(19) United States
(12) Patent Application Publication
(10) Pub. No.: US 2024/0392394 A1
(43) Pub. Date: Nov. 28, 2024

(54) COMPOSITIONS, KITS AND METHODS FOR DETECTION OF VIRAL VARIANT SEQUENCES

(71) Applicant: LIFE TECHNOLOGIES CORPORATION, Carlsbad, CA (US)

(72) Inventors: Pius BRZOSKA, Woodside, CA (US); Joyce WILDE, Moss Beach, CA (US); Manohar FURTADO, San Ramon, CA (US); Sara KENDRICK, Zionsville, IN (US); Camilla ULEKLEIV, Fetsund (NO); Junko STEVENS, Menlo Park, CA (US); Kamini VARMA, Saratoga, CA (US); Kathleen HAYASHIBARA, Campbell, CA (US)

(21) Appl. No.: 18/262,672

(22) PCT Filed: Jan. 25, 2022
(86) PCT No.: PCT/US2022/013665

§ 371 Date: Jul. 24, 2023

Related U.S. Application Data
(60) Provisional application No. 63/199,792, filed on Jan. 25, 2021.
(60) Provisional application No. 63/199,922, filed on Feb. 3, 2021.
(60) Provisional application No. 63/200,014, filed on Feb. 9, 2021.
(60) Provisional application No. 63/200,384, filed on Mar. 3, 2021.
(60) Provisional application No. 63/201,037, filed on Apr. 9, 2021.
(60) Provisional application No. 63/179,159, filed on Apr. 23, 2021.
(60) Provisional application No. 63/184,919, filed on May 6, 2021.
(60) Provisional application No. 63/251,407, filed on Oct. 1, 2021.
(60) Provisional application No. 63/282,830, filed on Nov. 24, 2021.
(60) Provisional application No. 63/286,712, filed on Dec. 7, 2021.
(60) Provisional application No. 63/286,965, filed on Dec. 7, 2021.
(60) Provisional application No. 63/289,733, filed on Dec. 15, 2021.
(60) Provisional application No. 63/298,156, filed on Jan. 10, 2022.

(51) Int. Cl. C12Q 1/70

(52) U.S. Cl. CPC C12Q 1/701; C12Q 2600/156

(57) ABSTRACT

Disclosed are compositions, assays, methods, diagnostic methods, kits and diagnostic kits for the specific and differential detection of SARS-CoV-2, including SARS-CoV-2 variants, or other coronaviruses from samples including veterinary samples, clinical samples, food samples, forensic sample, an environmental sample (e.g., soil, dirt, garbage, sewage, air, or water), including food processing and manufacturing surfaces, or a biological sample.

### CROSS-REFERENCE TO RELATED APPLICATIONS

[0001] This application claims priority to and the benefit of United States Provisional Patent Application Ser. Nos:
[0002] 63/199,792 filed Jan. 25, 2021;
[0003] 63/199,922 filed Feb. 3, 2021;
[0004] 63/200,014 filed Feb. 9, 2021;
[0005] 63/200,384 filed Mar. 3, 2021;
[0006] 63/201,037 filed Apr. 9, 2021;
[0007] 63/179,159 filed Apr. 23, 2021;
[0008] 63/184,919 filed May 6, 2021;
[0009] 63/251,407 filed Oct. 1, 2021;
[0010] 63/282,830 filed Nov. 24, 2021;
[0011] 63/286,712 filed Dec. 7, 2021;
[0012] 63/286,965 filed Dec. 7, 2021;
[0013] 63/289,733 filed Dec. 15, 2021; and
[0014] 63/298,156 filed Jan. 10, 2022.
   Each of the foregoing applications is incorporated herein in its entirety by this reference.

### INCORPORATION BY REFERENCE OF SEQUENCE LISTING

[0015] This application includes a Sequence Listing submitted electronically in ASCII format. The ASCII copy of the Sequence Listing, created on Jan. 15, 2022, is named 25 LT01605PCT-11398.267a-SL.txt and is 1,328,052 bytes in size. The ASCII copy of the Sequence Listing is expressly incorporated herein by this reference.

### FIELD

[0016] The present teachings relate to compositions, methods, systems and kits for specific detection, diagnosis and differentiation of viruses involved in infectious diseases. 30 Differential detection of specific viral agents allows accurate diagnosis so that appropriate treatment and infection control measures can be provided in a timely manner.

### BACKGROUND

[0017] Coronaviruses are a family of viruses having a positive-sense single stranded RNA genome of about 30 kilobases in length. Human coronaviruses were first identified in the mid 1960's as being one of the many etiologic agents of the common cold. People around the world commonly get infected with human coronavirus strains 229E (an alpha coronavirus), NL63 (an alpha coronavirus), OC43 (a beta coronavirus), and HKU1 (a beta coronavirus). These infections present with mild clinical symptoms and are associated with an extremely low mortality rate.

[0018] Some coronaviruses infect non-human animals where they can evolve and undergo zoonosis, expanding their tropism to humans. Such crossover events have proven devastating in years past. For example, the Middle East Respiratory Syndrome (MERS) was caused by MERS-CoV, a beta coronavirus that crossed over from dromedary camels to humans. MERS-CoV was associated with a high mortality rate of approximately 35%, but its low transmissibility rate helped to limit its spread and potential for devastation. As another example, Severe Acute Respiratory Syndrome (SARS), which was caused by SARS-CoV, another beta coronavirus, was believed to have been transmitted from bats to civet cats who then transmitted the virus to humans. Although not as deadly as MERS-CoV, SARS-CoV was nevertheless associated with a moderately high mortality rate of approximately 9.6%. Likely due, at least in part, to the lifecycle of SARS-CoV within humans, the spread of this virus was limited mostly to Southeast Asian countries. Human infected with SARS-CoV often became symptomatic prior to shedding infectious virions, making quarantining a particularly useful tool for limiting exposure and spread of the infection.

[0019] More recently, a new beta coronavirus, SARS-CoV-2 (also known as 2019-nCoV), has emerged, potentially from a crossover event between animals and humans in Wuhan, China. While the epidemiological data are incomplete, reports so far indicate that nearly 317 million people worldwide are believed to have been infected by SARS-CoV-2. However, unlike MERS-CoV and SARS-CoV before it, SARS-CoV-2 appears to be significantly less lethal on average. Due to its increased transmissibility, the seemingly small percentage of deaths associated with SARS-CoV-2 belies its worldwide impact, having caused an estimated 5.51 million deaths, at the time of this writing, in the worldwide pandemic. The raw number of humans impacted by SARS-CoV-2 dwarfs the total number of deaths caused by MERS-CoV and SARS-CoV combined-reportedly around 1,600.

[0020] Further, because SARS-CoV-2 is an RNA virus, it can mutate with relatively high frequency, with some estimating that SARS-CoV-2 undergoes about 1-2 mutations per month. Some variants, however, have acquired mutations more rapidly than expected. Indeed, as the pandemic has progressed, multiple new mutations and variants have been identified. The term “variant” is used to describe a subtype of a microorganism that is genetically distinct from a major “reference” form. SARS-CoV-2 variants are designated according to the Pango lineage nomenclature system, and more recently have also been identified using a World Health Organization (WHO) label. For example, for much of 2021 the dominant variant of SARS-CoV-2 in the United States and most of the world was the B.1.617.2 variant (under the Pango lineage nomenclature), more commonly referred to as “the Delta variant” (under the corresponding WHO label). At the time of this writing, the dominant variant is the B.1.1.529 variant (under the Pango lineage nomenclature), more commonly referred to as “the Omicron variant”.

[0021] The U.S. Centers for Disease Control and Prevention (CDC) and the WHO categorize variants as Variants Being Monitored (VBM) or Variants Under Monitoring (VUM), Variants of Interest (VOI), and Variants of Concern (VOC). A VBM is a variant for which there are data indicating an impact on medical countermeasures, or that has been associated with more severe disease or increased transmission but are no longer detected or are circulating at very low levels. A VOI is a variant with specific genetic markers that are predicted to affect transmission, diagnostics, therapeutics, or immune escape, but currently has limited prevalence or expansion. A VOC is a variant for which there is evidence of an increase in transmissibility, more severe disease (e.g., increased hospitalizations or deaths), significant reduction in neutralization by antibodies generated during previous infection or vaccination, reduced effectiveness of treatments or vaccines, or diagnostic detection failures. At the time of this writing, the CDC and the WHO each classify the Delta variant and the B.1.1.529 variant (“the Omicron variant”) as VOCs, and the WHO additionally includes the B.1.1.7 variant (“the Alpha variant”, previously referred to as “the UK variant”), the B.1.351 variant (“the Beta variant”, previously referred to as “the South African variant”), and the P.1 variant (“the Gamma variant”) as VOCs.

[0022] The Omicron variant includes approximately 30 genomic changes, including the 69-70del S gene mutation and 15 mutations in the receptor binding domain. Concerns associated with the Omicron variant include its increased transmissibility, apparent reduction in vaccine effectiveness, and increased risk for reinfections. Through much of 2021, the Delta variant was the dominant form of the virus in the United States and in many other parts of the world. Compared to the reference form of SARS-CoV-2, the Delta variant attributes include increased transmissibility and, in some cases, reduced neutralization by monoclonal antibody treatments and post-vaccination sera. The Alpha variant is estimated to be 70% more transmissible than the original SARS-CoV-2, and early studies indicate the possibility of increased risk of death in patients infected with this variant. The Beta variant is reportedly more contagious than the original SARS-CoV-2 and may be associated with poor response to antibody-based therapies.

[0023] Assays designed for earlier variants of SARS-CoV-2 may have decreased efficacy in detecting such newly emerging variants. For example, the Omicron, Delta, and Alpha variants have several mutations associated with the S protein region, which is a common target for detection assays. These mutations are substantial enough that some test components and protocols designed for earlier SARS-CoV-2 forms may show a negative result for the S protein region. This phenomenon is often referred to as “S gene dropout.” Although these and other new variants may still be detectable with some of the assays designed for earlier variants, their emergence highlights the continued risk that further mutations will render earlier assays less effective or even ineffective.

[0024] Given the present and continuing emergence of new and/or variant coronaviruses, there is an urgent need to develop methods for the rapid detection and characterization of existing and future coronavirus strains so that appropriate treatment and infection control measures can be properly instituted in a timely manner. In particular, given that SARS-CoV-2 is expected to continue to mutate and develop new variants as the pandemic progresses, there is an urgent need to develop assays capable of effectively detecting new variants and/or capable of distinguishing between different variants and/or mutations of SARS-CoV-2.

[0025] Accordingly, there are several disadvantages with current methods, systems, compositions, and kits for detecting SARS-CoV-2, particularly as new mutations and variants continue to emerge, that are addressed by the compositions, methods, and kits disclosed herein.

### BRIEF DESCRIPTION OF THE DRAWINGS

[0026] FIGS. 1A and 1B illustrate the sequence identity between SARS-CoV-2 and three closely related coronaviruses, namely, Bat-SL-CoVZC45, Bat-SL-CoVZXC21 and SARS-CoVGZO2. (Taken from Lu et al. “Genomic characterization and epidemiology of 2019 novel coronavirus: implications for virus origins and receptor binding.” Roujian Lu et al., The Lancet, Elsevier, Available online 30 Jan. 2020).

[0027] FIG. 1C is a schematic diagram of the RNA genome of SARS-CoV-2, illustrating potential target regions that assays described herein may be targeted toward.

[0028] FIG. 1D is a schematic illustration of the SARS-CoV-2 virion structure.

[0029] FIGS. 2A and 2B provide an overview of an exemplary assay design for detecting SARS-CoV-2 and distinguishing between a reference form and one or more variant forms.

[0030] FIGS. 2C and 2D illustrate primers and probes that may be utilized for the identification of SARS-CoV-2 variants and/or mutations and/or for distinguishing such SARS-CoV-2 variants from other SARS-CoV-2 variants, including distinguishing from a reference SARS-CoV-2 associated with the originally described SARS-CoV-2.

[0031] FIGS. 3A-3E illustrate allelic discrimination plots resulting from the use of assays targeting del69V70, N501Y, P681H, K417N, and E484K mutations, showing that assays as described herein are able to effectively discriminate between SARS-CoV-2 mutant sequences and a co-mixed SARS-CoV-2 reference sequence.

### DETAILED DESCRIPTION

[0032] All publications and patent applications cited herein, as well as the Appendices attached hereto, are incorporated by reference in their entirety for all purposes to the same extent as if each individual Appendix, publication or patent application were specifically and individually indicated to be so incorporated by reference. Although the Appendices attached hereto may include particular examples that reference specific target nucleic acids, formulations, and process steps, it will be understood that these examples may be modified by using any of the formulations, components, and/or process steps described elsewhere herein, including by using any of the primers and/or probes described herein. Further, although the present invention has been described in some detail by way of illustration and example for purposes of clarity and understanding, it will be apparent that certain changes and modifications may be practiced within the scope of the spirit and substance of this disclosure and of the appended claims.

### Overview of Compositions, Systems, and Kits for Detection of Viral Sequences

[0033] Given the present and continuing emergence of new genetic mutations and variants of interest and the importance of understanding the biological impact of such mutations in various contexts (such as, for example, tracking and diagnosis of the presence of infectious organisms, cancer-associated mutations, genealogy, and the like), there is an urgent need to develop compositions, kits, methods, and the like for the accurate and rapid detection and characterization of genetically variable targets. In the case of SARS-CoV-2, for example, appropriate variant tracking can be implemented so that treatment and infection control measures can be properly instituted in a timely manner. Each misidentified or misdiagnosed instance of SARS-CoV-2 infection further convolutes the epidemiological data and prevents the implementation of appropriate, informed solutions that may help reign in the pandemic. For example, missed diagnoses may be related to the failure of present detection assays to properly detect new and emerging variants of SARS-CoV-2.

[0034] In some embodiments, the present disclosure relates to compositions, kits and methods for detection of coronaviruses, in particular the coronavirus SARS-CoV-2. Also disclosed herein are compositions, kits, and methods for detecting one or more mutations and/or variants of SARS-CoV-2. Also disclosed herein are compositions, kits, and methods for determining whether detected SARS-CoV-2 one or more mutations associated with a “variant” form of SARS-CoV-2 or one or more alleles associated with the “reference” SARS-CoV-2 genome (as those terms are defined herein). For example, some embodiments relate to assays capable of detecting the presence of reference SARS-CoV-2, one or more variants, or combinations thereof. When an example “embodiment” or a particular “assay” is described herein, it will be understood that the features of the embodiment may be applicable to a composition (e.g., the particular physical components of an assay such as primers and/or probes), a kit (e.g., primers and/or probes and additional buffers, reagents, etc.), or a method (e.g., a process for detecting target nucleic acids) as appropriate. For simplicity, many embodiments are presented by describing “assays”, but it will be understood that the associated methods of using the assays are also intended to form part of this disclosure.

[0035] The SARS-CoV-2 virus, also known as 2019-nCoV, is associated with the human respiratory disease COVID-19. The virus isolated from early cases of COVID-19 was provisionally named 2019-nCoV. The Coronavirus Study Group of the International Committee on Taxonomy of Viruses has subsequently given the official designation of SARS-CoV-2. For the purposes of this disclosure SARS-CoV-2 and 2019-nCoV are considered to refer to the same virus.

[0036] Initial genetic characterization SARS-CoV-2 was reported by Lu et al. (“Genomic characterization and epidemiology of 2019 novel coronavirus: implications for virus origins and receptor binding.” Roujian Lu et al., The Lancet, Elsevier, Available online 30 Jan. 2020). Lu identified three coronavirus that show close homology to SARS-CoV-2: Bat-SL-CoVZC45, Bat-SL-CoVZXC21 and SARS-CoVGZO2. The sequence identity between these strains is depicted in FIGS. 1A and 1B. This analysis identified three genetic regions with significant variability between SARS-CoV-2 and the other viruses, specifically in the viral genes encoding the viral proteins for an Orf protein (e.g., Orf1a, Orf1b, Orf1ab, Orf8), the S protein and the N protein.

[0037] The genetic sequence of this “reference” form of SARS-CoV-2 is based on the sequence associated with NCBI accession no. NC_045512.2 (see GenBank: MN908947.3) which describes a genome of 29,903 base pairs. As an example of certain regions of the “reference” genome, the region of bp 1000 to bp 3000 associated with Orf1ab, is shown in Table 1.

TABLE 1
(bp 1 corresponds to bp 1000 of MN908947) SEQ ID NO: 7311.

```
      1 tgaaaagagc tatgaattgc agacaccttt tgaaattaaa ttggcaaaga aatttgacac
    61 cttcaatggg gaatgtccaa attttgtatt tcccttaaat tccataatca agactattca
  121 accaagggtt gaaaagaaaa agcttgatgg ctttatgggt agaattcgat ctgtctatcc
  181 agttgcgtca ccaaatgaat gcaaccaaat gtgcctttca actctcatga agtgtgatca
  241 ttgtggtgaa acttcatggc agacgggcga ttttgttaaa gccacttgcg aattttgtgg
  301 cactgagaat ttgactaaag aaggtgccac tacttgtggt tacttacccc aaaatgctgt
  361 tgttaaaatt tattgtccag catgtcacaa ttcagaagta ggacctgagc atagtcttgc
  421 cgaataccat aatgaatctg gcttgaaaac cattcttcgt aagggtggtc gcactattgc
  481 ctttggaggc tgtgtgttct cttatgttgg ttgccataac aagtgtgcct attgggttcc
  541 acgtgctagc gctaacatag gttgtaacca tacaggtgtt gttggagaag gttccgaagg
  601 tcttaatgac aaccttcttg aaatactcca aaaagagaaa gtcaacatca atattgttgg
  661 tgactttaaa cttaatgaag agatcgccat tattttggca tctttttctg cttccacaag
  721 tgcttttgtg gaaactgtga aaggtttgga ttataaagca ttcaaacaaa ttgttgaatc
  781 ctgtggtaat tttaaagtta caaaaggaaa agctaaaaaa ggtgcctgga atattggtga
  841 acagaaatca atactgagtc ctctttatgc atttgcatca gaggctgctc gtgttgtacg
  901 atcaattttc tcccgcactc ttgaaactgc tcaaaattct gtgcgtgttt tacagaaggc
  961 cgctataaca atactagatg gaatttcaca gtattcactg agactcattg atgctatgat
1021 gttcacatct gatttggcta ctaacaatct agttgtaatg gcctacatta caggtggtgt
1081 tgttcagttg acttcgcagt ggctaactaa catctttggc actgtttatg aaaaactcaa
1141 acccgtcctt gattggcttg aagagaagtt taaggaaggt gtagagtttc ttagagacgg
1201 ttgggaaatt gttaaattta tctcaacctg tgcttgtgaa attgtcggtg gacaaattgt
1261 cacctgtgca aaggaaatta aggagagtgt tcagacattc tttaagcttg taaataaatt
1321 tttggctttg tgtgctgact ctatcattat tggtggagct aaacttaaag ccttgaattt
1381 aggtgaaaca tttgtcacgc actcaaaggg attgtacaga aagtgtgtta aatccagaga
1441 agaaactggc ctactcatgc ctctaaaagc cccaaaagaa attatottct tagagggaga
1501 aacacttccc acagaagtgt taacagagga agttgtcttg aaaactggtg atttacaacc
1561 attagaacaa cctactagtg aagctgttga agctccattg gttggtacac cagtttgtat
1621 taacgggctt atgttgctcg aaatcaaaga cacagaaaag tactgtgccc ttgcacctaa
1681 tatgatggta acaaacaata ccttcacact caaaggcggt gcaccaacaa aggttacttt
1741 tggtgatgac actgtgatag aagtgcaagg ttacaagagt gtgaatatca cttttgaact
1801 tgatgaaagg attgataaag tacttaatga gaagtgctct gcctatacag ttgaactcgg
1861 tacagaagta aatgagttcg cctgtgttgt ggcagatgct gtcataaaaa ctttgcaacc
1921 agtatctgaa ttacttacac cactgggcat tgatttagat gagtggagta tggctacata
1981 ctacttattt gatgagtctg g
```

[0038] For the S gene region, bp 21564 thru 23564 is shown in Table 2.

TABLE 2
(bp 1 corresponds to bp 21564 of MN908947) SEQ ID NO: 7312.

```
      1 tgtttgtttt tcttgtttta ttgccactag tctctagtca gtgtgttaat cttacaacca
    61 gaactcaatt accccctgca tacactaatt ctttcacacg tggtgtttat taccctgaca
  121 aagttttcag atcctcagtt ttacattcaa ctcaggactt gttcttacct ttcttttcca
  181 atgttacttg gttccatgct atacatgtct ctgggaccaa tggtactaag aggtttgata
  241 accctgtcct accatttaat gatggtgttt attttgcttc cactgagaag tctaacataa
  301 taagaggctg gatttttggt actactttag attcgaagac ccagtcccta cttattgtta
  361 ataacgctac taatgttgtt attaaagtct gtgaatttca attttgtaat gatccatttt
  421 tgggtgttta ttaccacaaa aacaacaaaa gttggatgga aagtgagttc agagtttatt
  481 ctagtgcgaa taattgcact tttgaatatg tctctcagcc ttttcttatg gaccttgaag
  541 gaaaacaggg taatttcaaa aatcttaggg aatttgtgtt taagaatatt gatggttatt
  601 ttaaaatata ttctaagcac acgcctatta atttagtgcg tgatctccct cagggttttt
  661 cggctttaga accattggta gatttgccaa taggtattaa catcactagg tttcaaactt
  721 tacttgcttt acatagaagt tatttgactc ctggtgattc ttcttcaggt tggacagctg
  781 gtgctgcagc ttattatgtg ggttatcttc aacctaggac ttttctatta aaatataatg
  841 aaaatggaac cattacagat gctgtagact gtgcacttga ccctctctca gaaacaaagt
  901 gtacgttgaa atccttcact gtagaaaaag gaatctatca aacttctaac tttagagtcc
  961 aaccaacaga atctattgtt agatttccta atattacaaa cttgtgccct tttggtgaag
1021 tttttaacgc caccagattt gcatctgttt atgcttggaa caggaagaga atcagcaact
1081 gtgttgctga ttattctgtc ctatataatt ccgcatcatt ttccactttt aagtgttatg
1141 gagtgtctcc tactaaatta aatgatctct gctttactaa tgtctatgca gattcatttg
1201 taattagagg tgatgaagtc agacaaatcg ctccagggca aactggaaag attgctgatt
1261 ataattataa attaccagat gattttacag gctgcgttat agcttggaat tctaacaatc
1321 ttgattctaa ggttggtggt aattataatt acctgtatag attgtttagg aagtctaatc
1381 tcaaaccttt tgagagagat atttcaactg aaatctatca ggccggtagc acaccttgta
1441 atggtgttga aggttttaat tgttactttc ctttacaatc atatggtttc caacccacta
1501 atggtgttgg ttaccaacca tacagagtag tagtactttc ttttgaactt ctacatgcac
1561 cagcaactgt ttgtggacct aaaaagtcta ctaatttggt taaaaacaaa tgtgtcaatt
1621 tcaacttcaa tggtttaaca ggcacaggtg ttcttactga gtctaacaaa aagtttctgc
1681 ctttccaaca atttggcaga gacattgctg acactactga tgctgtccgt gatccacaga
1741 cacttgagat tcttgacatt acaccatgtt cttttggtgg tgtcagtgtt ataacaccag
1801 gaacaaatac ttctaaccag gttgctgttc tttatcagga tgttaactgc acagaagtcc
1861 ctgttgctat tcatgcagat caacttactc ctacttggcg tgtttattct acaggttcta
1921 atgtttttca aacacgtgca ggctgtttaa taggggctga acatgtcaac aactcatatg
1981 agtgtgacat acccattggt g
```

[0039] For the N gene region, bp 28275 thru 29558 is shown in Table 3.

TABLE 3
(bp 1 corresponds to bp 28275 of MN908947) SEQ ID NO: 7313.

```
      1 tgtctgataa tggaccccaa aatcagcgaa atgcaccccg cattacgttt ggtggaccct
    61 cagattcaac tggcagtaac cagaatggag aacgcagtgg ggcgcgatca aaacaacgtc
  121 ggccccaagg tttacccaat aatactgcgt cttggttcac cgctctcact caacatggca
  181 aggaagacct taaattccct cgaggacaag gcgttccaat taacaccaat agcagtccag
  241 atgaccaaat tggctactac cgaagagcta ccagacgaat tcgtggtggt gacggtaaaa
  301 tgaaagatct cagtccaaga tggtatttct actacctagg aactgggcca gaagctggac
  361 ttccctatgg tgctaacaaa gacggcatca tatgggttgc aactgaggga gccttgaata
  421 caccaaaaga tcacattggc acccgcaatc ctgctaacaa tgctgcaatc gtgctacaac
  481 ttcctcaagg aacaacattg ccaaaaggct tctacgcaga agggagcaga ggcggcagtc
  541 aagcctcttc tcgttcctca tcacgtagtc gcaacagttc aagaaattca actccaggca
  601 gcagtagggg aacttctcct gctagaatgg ctggcaatgg cggtgatgct gctcttgctt
  661 tgctgctgct tgacagattg aaccagcttg agagcaaaat gtctggtaaa ggccaacaac
  721 aacaaggcca aactgtcact aagaaatctg ctgctgaggc ttctaagaag cctcggcaaa
  781 aacgtactgc cactaaagca tacaatgtaa cacaagcttt cggcagacgt ggtccagaac
  841 aaacccaagg aaattttggg gaccaggaac taatcagaca aggaactgat tacaaacatt
  901 ggccgcaaat tgcacaattt gcccccagcg cttcagcgtt cttcggaatg tcgcgcattg
  961 gcatggaagt cacaccttcg ggaacgtggt tgacctacac aggtgccatc aaattggatg
1021 acaaagatcc aaatttcaaa gatcaagtca ttttgctgaa taagcatatt gacgcataca
1081 aaacattccc accaacagag cctaaaaagg acaaaaagaa gaaggctgat gaaactcaag
1141 ccttaccgca gagacagaag aaacagcaaa ctgtgactct tcttcctgct gcagatttgg
1201 atgatttctc caaacaattg caacaatcca tgagcagtgc tgactcaact caggcctaaa
1261 ctcatgcaga ccacacaagg caga
```

[0040] As used herein, in the context of SARS-CoV-2 as a target organism, a “mutant” or “variant” has one or more mutations (e.g., SNP or deletion mutations) in one or more of the above regions and/or other sites of the genomic sequence as compared to the “reference” SARS-CoV-2.

[0041] Several SARS-CoV-2 qPCR based tests currently on the market are designed to target one or more regions shown in Tables 1-3. Examples include the kit developed by the CDC containing probes targeting the N protein; the kit developed by the Chinese CDC targeting the N and Orf proteins, as well as the WHO kit targeting the N protein, the E protein, and the closely related RdRp SARS/Wuhan coronavirus. However, as discussed above, new mutations and variants of SARS-CoV-2 have emerged and continue to emerge, and the currently available assays are not optimized for such newly emerging variants. The currently available assays cannot be utilized to identify new SARS-CoV-2 variants or distinguish between different variants and may even fail to detect the presence of certain SARS-CoV-2 variants and thus lead to false negative test results. In contrast, embodiments described herein can be beneficially utilized to detect and identify various emerging mutations and variants of SARS-CoV-2, to distinguish variant forms from the original reference form, and/or to distinguish variant forms from one another.

[0042] Further, because SARS-CoV-2 is an RNA virus, it can mutate with relatively high frequency, meaning additional mutations and variants will continue to emerge over time. Specific detection of SARS-CoV-2 can be enhanced even in the case of such future variants by targeting multiple regions of the SARS-CoV-2 genome (e.g., by combining assays specific for the N gene, S gene, Orf1 regions, and/or other genomic regions) thereby compensating for possible virus mutations and/or SARS-CoV-2 variants. FIG. 1C is a diagram of the SARS-CoV-2 RNA genome showing particular regions that may be targeted. As shown, potential target genes include the Orf1a, Orf1b, S, E, M, and N genes, among several other accessory proteins. The SARS-CoV-2 genome encodes two large genes Orf1a and Orf1b, which encode 16 non-structural proteins (NSP1-NSP16). These NSPs are processed to form a replication-transcription complex (RTC) that is involved in genome transcription and replication. With additional reference to FIG. 1D, which illustrates the SARS-CoV-2 virion structure, the structural genes encode the structural proteins, spike (S), envelope (E), membrane (M), and nucleocapsid (N). The accessory proteins are unique to SARS-CoV-2 in terms of number, genomic organization, sequence, and function.

[0043] For example, in some embodiments, positive identification of SARS-CoV-2 is determined by detection of N gene and S gene targets. In some embodiments, positive identification of SARS-CoV-2 is determined by detection of N gene and Orf1 region targets. In some embodiments, positive identification of SARS-CoV-2 is determined by detection of S gene and Orf1 targets. In some embodiments, positive identification of SARS-CoV-2 is determined by detection of N gene, S gene, and Orf1 region targets. In some embodiments, positive identification of a SARS-CoV-2 variant is determined by detection of at least one of an N gene, S gene and Orf1 region target combined with non-detection of at least one of an N gene, S gene and Orf1 region target. This may include, for example, non-detection of the S gene due to S gene dropout common to several variants along with positive detection of one or more other targets. In some embodiments, such as where only 1 of 2 or 3 targets is detected (e.g., N gene or Orf1 region target(s) detected and S gene target not detected) or 2 of 3 targets are detected (e.g., N gene and Orf1 region target(s) detected and S gene target not detected), the methods as described herein can further include confirmation by Sanger sequencing for determination of a positive diagnosis of SARS-CoV-2 and/or specifying the variant involved.

[0044] Table 4 illustrates some of the mutations that have occurred in the SARS-CoV-2 genome, as well as some of their associated variants, where known. The numbering system used to designate these mutations is based on the “reference” sequence as defined above. For example, the mutation “S.N501Y.AAT.TAT” refers to a mutant form of the spike (S) protein wherein amino acid residue no. 501 is changed from asparagine (A) to tyrosine (Y). The latter portion of the label may recite the mutation according to standard nucleotide variation, or as in the example “AAT.TAT” compares the reference codon to the mutant codon and illustrates that the mutation is associated with a change from an adenine (A) to a thymine (T) (i.e., the AAT of the reference codon is changed to a TAT in the mutant codon). Mutations may be listed according to nucleotide variation and/or according to amino acid variation. Not all mutations are necessarily within a gene region and thus some labels may omit a gene prefix. Note that RNA comprises uracil (U), but notation included herein may sometimes simply refer to the corresponding DNA base pair thymine (T). The initial part of the label specific to the gene or protein involved and/or the latter portion of the label specific to the nucleotide mutation may occasionally be dropped from the label for convenience. The latter portion of the label may also be shortened to simply show the single reference nucleotide and mutant nucleotide, rather than the entire reference and mutant codon. Those with skill in the art will readily recognize the mutation nomenclature used herein.

TABLE 4
SARS-CoV-2 Mutations

| | | | Earliest Documented |
|---|---|---|---|
| Mutation | WHO Label | Associated Variants | Samples |
| S.D215G.GAT.GGT | Beta | B.1.351 | South Africa |
| S.D614G.GAT.GGT | Various | B.1.1.207, P.1, | Nigeria, United |
| | | B.1.1.33, B.1.1.7, | Kingdom, South Africa, |
| | | B.1.177, B.1.258, | Brazil/Amazon |
| | | B.1.351, B.1.525, | |
| | | Mink variant | |
| S.delH69V70 | Alpha | B.1.1.7, B.1.258, | United Kingdom |
| | | B.1.525 | |
| S.delY144 | Alpha | B.1.1.7 | United Kingdom |
| S.E484K.GAA.AAA | Beta, | P.1, B.1.1.33, | South Africa, Brazil |
| | Gamma, | B.1.351, B.1.525 | |
| | Eta | | |
| S.E484Q.GAA.CAA | Delta | B.1.617, B.1.617.1, | India |
| | (absence | B.1.617.3 | |
| | of this | | |
| | mutation) | | |
| S.F888L.TTT.CTT | Eta | B.1.525 | 20A/S: 484K United |
| | | | Kingdom |
| S.K417N.AAG.AAT | Beta | B.1.351 | South Africa |
| S.K417T.AAG.ACG | Gamma | P.1 | Brazil/Amazon |
| S.L18F.CTT.TTT | Gamma | B.1.351, P.1, P.1.15, | South Africa, |
| | | P.1.7, P.1.17, P.1.2, | Brazil/Amazon |
| | | P.1.12, P.1.6, P.1.14 | |
| S.L452R.CTG.CGG | Delta, | B.1.617, B.1.617.1, | India, California |
| | Epsilon | B.1.617.2, B.1.617.3, | |
| | | B.1.429 | |
| S.N439K.AAC.AAA | | B.1.258, B.1.466.2 | |
| S.N501Y.AAT.TAT | Alpha, | P.1, B.1.1.7, B.1.351 | United Kingdom, South |
| | Beta, | | African, Brazil/ |
| | Gamma | | Amazon |
| S.P681H.CCT.CAT | Alpha | B.1.1.207, B.1.1.7 | Nigeria, United |
| | | | Kingdom |
| S.P681R.CCT.CGT | Delta | B.1.617.1, B.1.617.2, | India |
| | | B.1.617.3 | |
| S.S13I.AGT.ATT | Epsilon | B.1.427, B.1.429 | California |
| S.S477N.AGC.AAC | Iota | B.1.526, B.1.1.397 | New York |
| S.T20N.ACC.AAC | Gamma | P.1, P.1.12, P.1.14, | Brazil/Amazon |
| | | P.1.2, P.1.6, P.1.15, | |
| | | P.1.17, P.1.7 | |
| S.V1176F.GTT.TTT | | P.2 | Brazil |
| Orflab.A13057T | Mu | B.1.621 | Colombia |
| Orf1.A1708D.GCT.GAT | Alpha | B.1.1.7, Q.7 | United Kingdom |
| S.A222V.GCT.GTT | | B.1.177 | |
| Orflab.A2710T | Omicron | B.1.1.529 | Various |
| CoV1.A28272T | Mu, Epsilon | B.1.621, A.2.5.2, | Colombia |
| | | B.1.429 | |
| S.A570D.GCT.GAT | Alpha | B.1.1.7, Q.7 | United Kingdom |
| S.A701V.GCA.GTA | Beta | B.1.351 | South Africa |
| N.D3L.GAT.CTA | Alpha | B.1.1.7, Q.7 | United Kingdom |
| S.D80A.GAT.GCT | Beta | B.1.351 | South Africa |
| S.delL242.244L | Beta | B.1.351 | South Africa |
| S.E583D.GAG.GAT | | B.177 | |
| S.E583D.GAG.GAC | | B.177 | |
| S.EFR156-158G | Delta | B.1.617.2 | India |
| S.F157L.TTC.TTA | | A.23 | |
| S.F157S.TTC_TCC | Iota | B.1.526, B.1.637 | United States |
| S.G339D.GGT_GAG | Omicron | B.1.1.529 | Various countries |
| S.G446V.GGT.GTT | | | |
| S.G769V.GGA.GTA | | | |
| S.H66D.CAT.GAT | | | |
| Orf1.K1795Q.AAA.CAA | Gamma | P.1, P.1.12, P.1.2, | |
| | | P.1.7, P.1.6, P.1.15 | |
| S.L452Q.CTG.CAG | Lambda | C.37 | Mink |
| S.N450K.AAT.AAG | | B.1.214 | |
| S.N460K.AAT.AAA | | | |
| S.N460K.AAT.AAG | | Q.7 | |
| S.N460T.AAT.ACT | | | |
| P5743S.CCA_TCA | Mu | B.1.621 | Colombia |
| Orf8.Q27ST.CAA.TAA | Alpha | B.1.1.7 | United Kingdom |
| S.Q493R.CAA_CGA | Omicron | B.1.1.529 | Various countries |
| S.Q498R.CAA.CGA | | | |
| S.Q52R.CAG.CGG | Eta | 1.525 | |
| S.Q613H.CAG.CAT | | A.23 | |
| S.Q677H.CAG.CAT | Eta | 1.525 | |
| S.Q677H.CAG.CAC | Eta | 1.525 | |
| S.R246I.AGA.ATA | Beta | B.1.351 | South Africa |
| S.R346K.AGA_AAA | Mu | B.1.621 | Colombia |
| S.S982A.TCA.GCA | Alpha | B.1.1.7, Q.7 | United Kingdom |
| S.Y145H.TAC.CAC | Delta+ | AY.4.2 | India |
| T1055A.ACA_GCA | Mu | B.1.621 | Colombia |
| Orflab.T13195C | Omicron | B.1.1.529 | Various |
| S.T19R.ACA.AGA | Delta | B.1.617.2 | India |
| S.T478K.ACA.AAA | Delta | B.1.617.2 | |
| S.T547K.ACA.AAA | Omicron | B.1.1.529 | Various |
| S.T716I.ACA.ATA | Alpha | B.1.1.7 | United Kingdom |
| S.T95I.ACT_ATT | Iota, Mu | B.1.526, B.1.621.1 | United States, |
| | | | Colombia |
| S.V367F.GTC.TTC | | A.23 | |
| S.W152L.TGG.TTG | | R.1 | |
| S.Y453F.TAT.TTT | | B.1.1.298, B.1.438.1 | Mink |
| S.D1118H.G_C | | B.1.1.7, Q.7 | United Kingdom |
| Orflab.G514G.A1807G | Eta | B.1.525 | |
| Orflab. F2387V.T7424G | Lambda | C.37 | |
| S.W152C.G22018T | Epsilon | B.1.429 | |
| S.T478R.C22995G | | B.1.637 | |
| S.N679K.T23599A | | C.1.2 | |
| S.N764K.C23854A | Omicron | BA.3, P.1.17, BA.1, | |
| | | BA.2 | |
| S.Q1071H.A24775T | | B.1.617.1 | |
| A28273T | | B.1.1.397 | |
| N.P142P.A28699G | Eta | B.1.525 | |
| N.G214C.G28913T | Lambda | C.37 | |

[0045] As explained above, these mutant variants, as well as others that may emerge in the future, may not be detected with the same efficacy using conventional diagnostic assays. Moreover, even if such variants are generally detected by conventional assays, the conventional assays are likely unable to determine whether the detected SARS-CoV-2 nucleic acid is associated with the reference form or with a particular mutation sequence in a specific region or gene (e.g., an S gene variant or mutation), such as for a particular single nucleotide polymorphism (SNP). This lack of resolution can prove problematic in attempts to track the spread and progression of such variants and/or requires more expensive and lengthy sequencing testing to identify particular variants.

### Example Assays & Associated Components

[0046] Embodiments disclosed herein include primers and optionally probes useful for the detection of SARS-CoV-2 and/or for the identification of variants thereof, in a sample (e.g., a biological or environmental sample). Such primers, oligonucleotides, and probes can be used in a nucleic acid assay (singleplex or multiplex) for detection and identification one or more nucleic acid targets in a sample. The singleplex and multiplex assays described herein demonstrate a high level of sensitivity, specificity, and accuracy. In some embodiments, an assay is designed to detect and differentiate between different forms of SARS-CoV-2. For example, an assay may be configured to detect the presence of SARS-CoV-2 nucleic acid within a biological sample and to identify whether the detected SARS-CoV-2 is from reference SARS-CoV-2 or from a variant. In some embodiments, for example, an assay includes differentially labeled probes such that at least one probe is designed for association with reference allele amplicons while at least one, different probe is designed for association with amplicons of a mutant/variant.

[0047] In some embodiments, an assay includes differentially labelled probes such that at least one probe is designed for association with amplicons of a first mutant/variant while at least one, different probe is designed for association with amplicons of a second mutant/variant. Additional labelled probes for additional mutants/variants and/or for the reference form may be further included. Thus, even though some embodiments may be “singleplex” in the sense that they include a single forward primer and single corresponding reverse primer for a single target genomic region, they are nevertheless “multiplex” in that they are capable of detecting one or more SARS-CoV-2 variants and/or distinguishing between forms of SARS-CoV-2 (e.g., distinguishing between reference SARS-CoV-2 and mutants/variants and/or distinguishing between different variants) due to the inclusion of different probes that associate with different SARS-CoV-2 variant forms.

[0048] In some embodiments, assays are configured to detect an amplification product of a particular target region by detecting a signal from a label (i.e., a detectable label) or other signal-generating process, where the signal indicates formation of the amplification product. In some embodiments, the label is attached to, or otherwise associated with, the corresponding forward primer and/or reverse primer used to generate the amplification product. Additionally, or alternatively, the label is attached to, or otherwise associated with, a probe configured to associate with a probe binding sequence within the target region. In some embodiments, the label is an optically detectable label. Alternatively, the label may be detectable via non-optical means including electronically, electrically, or using NMR, sound, radioactivity, and the like.

[0049] FIGS. 2A and 2B illustrate one exemplary process for detecting SARS-CoV-2 and distinguishing between different forms, such as between forms that share the reference allele and a variant form or between different variant forms. As shown in FIG. 2A, reverse transcription of target RNA is followed by amplification of the resulting cDNA. The reaction mixture includes two or more separate probes each designed to target a different form of the target. In this example, a wild type “W” probe is designed to hybridize to amplicons resulting from the reference form (or from variants that share the reference allele for the targeted region), while a mutant “M” probe is designed to hybridize to amplicons resulting from a variant form having one or more mutations in the targeted region. Each probe type is also associated with a different dye channel to enable differential detection. In this example, the reference “W” probe includes a VIC dye label and the variant “M” probe includes a FAM dye label. The probes may be configured as TaqMan probes, which are known in the art and described in greater detail below. As shown in FIG. 2B, when the probe is able to hybridize to a target downstream from a primer, the exonuclease activity of the polymerase during subsequent primer extension separates the dye label from the quencher to increase the dye signal.

[0050] Disclosed herein are primers and probes that correspond to mutations and variants (e.g., mutations and/or variants disclosed in Table 4), and that may be utilized in assays that can beneficially identify particular variants associated with such mutations and/or distinguish such variants from other variants (and/or from reference SARS-CoV-2). FIGS. 2C and 2D illustrate exemplary primers and probes that may be utilized in such assays. FIG. 2C illustrates exemplary forward primers (corresponding to SEQ ID NO:1-SEQ ID NO: 1304) and reverse primers (corresponding to SEQ ID NO:2001-SEQ ID NO:3304), while FIG. 2D illustrates exemplary probes (corresponding to SEQ ID NO:4001-SEQ ID NO:5304 and SEQ ID NO:6001-SEQ ID NO:7304) that may be utilized in conjunction with corresponding forward and reverse primers of FIG. 2C. For example, in some embodiments, an assay can include a forward primer and reverse primer in a particular “No.” row of FIG. 2C and a reference probe and mutant probe in the same “No.” row of FIG. 2D. In other embodiments, an assay can include one or more forward primers selected from SEQ ID NO:1-SEQ ID NO:1304, one or more reverse primers selected from SEQ ID NO:2001-SEQ ID NO:3304, one or more reference sequence probes selected from SEQ ID NO:4001-SEQ ID NO:5304 and/or one or more mutant sequence probes selected from SEQ ID NO:6001-SEQ ID NO:7304. In particular, the probes of SEQ ID NO:4001-SEQ ID NO:5304 are configured for association with a reference SARS-CoV-2 allele at the corresponding target, while the probes of SEQ ID NO:6001-SEQ ID NO:7304 are configured for association with a mutant allele at the corresponding target. The probes of SEQ ID NO:4001-SEQ ID NO:5304 and SEQ ID NO:6001-SEQ ID NO:7304 may therefore be used in conjunction with each other to identify whether a SARS-CoV-2 mutation is present at the target, to distinguish between reference SARS-CoV-2 and one or more mutants/variants, and/or to distinguish between different variants. Thus, in some embodiments, a “singleplex” reaction as described herein may comprise a single forward and a single reverse primer for each target, used in combination with a set of at least two probes, in some embodiments including a first probe specific to a reference SARS-CoV-2 allele and a second probe specific to a mutant/variant allele. In some embodiments, a first probe is specific to a first mutant allele at the target and a second probe is specific to a second, different mutant allele at the target.

[0051] In some embodiments, multiple assays each corresponding to a different mutation can be combined to create an assay panel targeted to a specific variant of SARS-CoV-2 and/or to distinguish between different strains of SARS-CoV-2. For example, with reference to Table 4, the B.1.1.7 (Alpha) variant includes the delH69V70, N501Y, P681H, Q27stop, delY144, A570D, T716I, S982A, and D1118H mutations. A selection of one or more assays described herein (e.g., illustrated in FIGS. 2C and 2D) each tailored to a different mutation that characterizes the B.1.1.7 variant can be combined to create an assay panel that is specifically targeted to the B.1.1.7 variant. Such an assay panel can be utilized, for example, to determine that each of the tested mutations are present and are thus indicative of the presence of the variant in the sample.

[0052] In another example, the B.1.617.2 (Delta) variant includes the L452R, P681R, T19R, and T478K mutations, among others. A selection of assays tailored to these mutations may be combined to create an assay panel specifically targeted to the B.1.617.2 variant. With reference to FIGS. 2C and 2D, the assay associated with Row No. 784 may be utilized to detect the L452R mutation, the assays associated with Row No. 968 may be utilized to detect the P681R mutation, one or both of the assays associated with Row Nos. 1188 and/or 1189 may be utilized to detect the T19R mutation, one or more of the assays associated with Row Nos. 1192 and/or 1193 may be utilized to detect the T478K mutation, and so on for other mutations for which detection is desired. The assay associated with Row No. 784 corresponds to SEQ ID NO:784 (forward primer), SEQ ID NO:2784 (reverse primer), SEQ ID NO:4784 (reference allele probe), and SEQ ID NO:6784 (mutant allele probe). The other assays correspond to SEQ ID NOs. in the same manner, such that an assay of row “X” includes a forward primer of SEQ ID NO:X, a reverse primer with a SEQ ID NO. of “X” plus 2000, a reference allele probe with a SEQ ID NO. of “X” plus 4000, and a mutant/variant allele probe with a SEQ ID NO. of “X” plus 6000. Other assay panels can be formed for other variants by combining different assays for mutations associated with those variants.

[0053] In another example, the B.1.1.529 (Omicron) variant includes the A2710T, G339D, Q493R, T13195C, and T547K mutations, among others. A selection of assays tailored to these mutations may be combined to create an assay panel specifically targeted to the B.1.1.529 variant. With reference to FIGS. 2C and 2D, the assay associated with Row No. 616 may be utilized to detect the G339D mutation, one or more of the assays associated with Row Nos. 972-975 may be utilized to detect the Q493R mutation, one or more of the assays associated with Row Nos. 71-72 may be utilized to detect the T13195C mutation, and the assay associated with Row No. 1196 may be utilized to detect the T547K mutation. As above, the assays numbers correspond to SEQ ID NOs. such that an assay of row “X” includes a forward primer of SEQ ID NO:X, a reverse primer with a SEQ ID NO. of “X” plus 2000, a reference allele probe with a SEQ ID NO. of “X” plus 4000, and a mutant/variant allele probe with a SEQ ID NO. of “X” plus 6000.

[0054] In an embodiment, the multiplex assay is designed to differentiate between a first and second organism by assaying for the presence of one or more target sites (also referred to herein as “markers”, e.g., 2, 3, 4, 5, 8, 12, 48, >10, >20, >30, >50, >100, >200, >500) more likely to be associated with the first organism but not the second organism. For example, the one or more markers or target sites are known to be typically present in the first organism and have been found to be typically absent in the second organism. One exemplary multiplex assay is designed to assay for at least one marker (e.g., 2, 3, 4, 5, 8, 12, 24, 48, >10, >20, >30, >50, >100, >200, >500) typically associated with the first organism, and at least one marker (e.g., 2, 3, 4, 5, 8, 12, 24, 48, >10, >20, >30, >50, >100, >200, >500) associated with the second organism. Similarly, the multiplex assay can be designed to distinguish between 3, 4, 5, 8, 10 or more organisms by including marker(s) that are specific to some but not all of the organisms. For example, at least one marker is specific to 2, 3, 4, or 5 (but not all) organisms being assayed.

[0055] The first and second organism can be genetically or symptomatically similar and can be difficult to distinguish symptomatically. For example, the first or second organism can be a SARS virus such as SARS-CoV or SARS-CoV-2, MERS-CoV, other viral pathogens such as Influenza Type A and/or Type B, and RSV Type A and/or Type B, bacterial pathogens, and/or fungal pathogens. In one such example, the first organism is SARS-CoV-2 or SARS-CoV or a particular strain of SARS-CoV-2, whereas the second organism is a different species of strain of SARS-CoV, SARS-CoV-2 or Influenza Type A or B. Particularly, the first and second organisms can be different strains of SARS-CoV-2, such as the B.1.1.7 variant and/or the B.1.351 variant. In an embodiment, some or all of the at least one marker typically associated with a first strain of SARS-CoV-2 are typically absent in the second strain of SARs-CoV-2. The first and/or second strain can, for example, be selected from SARS-CoV-2 Alpha, Beta, Gamma, Delta, Epsilon, Eta, Iota, Kappa, Lambda, Mu or Omicron variants. The same multiplex assay can be designed to differentiate between three, four, five, six, seven, eight, 10, 11, or all known strains of SARS-CoV-2 by appropriate selection of a number of target sites. For example, the assay panel can target markers that are associated with one single strain of SARS-CoV-2, or two, three, or four strains of SARS-CoV-2, but are not typically found in all strains of SARS-CoV-2.

[0056] One exemplary multiplex assay panel is designed to assay for at least one marker typically associated with a first strain of SARS-CoV-2 (e.g., the B.1.1.7 variant) and at least one marker associated with one or more different strains of SARS-CoV-2, such as the B.1.1.529 (“Omicron”) variant or the B.1.351 variant. Optionally, one or more markers in this assay can be generic (i.e., variant-agnostic) to one or more strains of SARS-CoV-2.

[0057] The multiplex assay, by appropriate choice of markers, can be designed to identify one or more organisms with significantly greater than random accuracy, for example greater than 70%, 80%, 90%, 95%, 97%, 98%, 99%, 99.5%, or 99.9% accuracy. In an embodiment, each marker is less than 70%, 80% or 90% accurate in identifying a particular strain of SARS-CoV-2, but a combination of any number of markers, e.g., two, three, four, six, eight or more markers is more than 90%, 95% or 99% accurate in identifying the strain. Optionally, at least one of these markers is typically present in the strain. Optionally, at least one of these markers is typically absent in the strain, but present in at least one other strain of SARS-CoV-2.

[0058] In one embodiment, the reference probes are VIC-labelled, while the mutant/variant probes are FAM-labelled. However, these labels may be swapped, or other suitable labels, as known in the art and/or as described elsewhere herein, may be additionally or alternatively be utilized for a reference probe or a mutant/variant probe, including, but not limited to, JUN, ABY, Alexa Fluor dye labels (e.g., AF647 and AF676), and combinations thereof.

### Sample Collection

[0059] The disclosed compositions, kits, and methods are configured to detect viral nucleic acid from a sample, preferably a specific and differential detection of SARS-CoV-2 or variant thereof from a sample. The sample may be a veterinary sample, a clinical sample, a food sample, a forensic sample, an environmental sample (e.g., soil, dirt, garbage, sewage, air, or water), including food processing and manufacturing surfaces, or a biological sample. In some embodiments, the sample is a human sample. In some embodiments, the sample is a non-human sample. For instance, the sample may be from a non-human species such as a dog, cat, mink, livestock animal (e.g., pigs, cattle, sheep, goats), etc. In most instances, SARS-CoV-2 or other coronaviruses and respiratory tract pathogens are detected by analysis of swabs or fluid obtained from swabs, such as throat swabs, nasal swabs, nasopharyngeal swabs, cheek swabs, saliva swabs, or other swabs, though it should be appreciated that SARS-CoV-2 or other coronaviruses and/or respiratory tract pathogens may also be detected by analysis of urine samples, saliva samples, or other clinical samples. Such samples may be collected with a collection device such as a tube, a dish, a bag, a plate, or any other appropriate container.

[0060] The sample can be collected by a healthcare professional in a healthcare setting, but in some instances, the sample may also be collected by the patient themselves or by an individual assisting the patient in self-collection. For example, a nasopharyngeal swab has heretofore served as the gold standard for obtaining a patient sample to be used in clinical diagnostics. Such swabs are often used by a healthcare professional in a healthcare setting. Other samples, such as a saliva sample, can similarly be obtained in a healthcare setting with the assistance or oversight of a healthcare professional. However, in some instances, self-collection of a sample can be more efficient and can be done outside of a healthcare setting.

[0061] In some embodiments, the sample is a raw saliva sample collected—whether by self-collection or assisted/supervised collection—in a sterile tube or specifically-designed saliva collection device. The saliva collection tube/device may be a component of a self-collection kit having instructions for use, such as sample collection instructions, sample preparation or storage instructions, and/or shipping instructions. The raw saliva sample can be collected directly into a sealable container without any preservation solution or other fluid or substance in the container prior to receipt of the saliva sample within the container or because of closing/sealing the container.

[0062] Traditionally, a nucleic acid fraction of the sample is extracted or purified from the sample—whether obtained via swab, from raw saliva, or other bodily fluid—prior to any detection of viral nucleic acids therein. Surprisingly, the disclosed embodiments for detecting viral nucleic acid from a sample can be adapted to detect viral nucleic acid directly from a raw saliva sample without a specific nucleic acid purification and/or extraction step prior to its use in downstream detection assays (e.g., RT-qPCR). In some embodiments, the saliva sample is pre-treated prior to use. This can include, for example, heating the saliva sample, such as by placing the raw saliva sample on a heat block/water bath set to a temperature of 95° C. for 30 minutes, followed by combining the heat-treated saliva with a buffer or lysis solution. The buffer or lysis solution can include, for example, any nucleic-acid-amenable buffer such as TBE and may further include a detergent and/or emulsifier such as the polysorbate-type nonionic surfactant, Tween-20.

[0063] In some embodiments, a nucleic acid fraction of the sample (e.g., obtained by a swab) can be extracted and used for downstream analysis, such as RT-qPCR. In some embodiments, the sample is a raw saliva sample. As provided above, the raw saliva sample can be self-collected (e.g., within a saliva collection device or sterile tube) or collected from the patient by any other individual in proximity to the patient. In some embodiments, the raw saliva sample is collected directly into a sealable container without any preservation solution or other fluid or substance in the container prior to receipt of the saliva sample or because of closing/sealing the container. The disclosed embodiments for detecting viral nucleic acid from a sample can be adapted to detect viral nucleic acid directly from the saliva sample, or in alternative embodiments, the sample can undergo a specific RNA purification and/or extraction step prior to its use in a detection assay (e.g., RT-qPCR). Thus, it should be appreciated that in some embodiments, a patient sample (e.g., saliva) can directly serve as sample input for subsequent downstream analyses, such as PCR, and this can be accomplished, in some embodiments, with no nucleic acid purification and/or extraction step prior to its use. In some embodiments, the sample used in subsequent downstream analyses is a heat-treated saliva sample as described herein.

[0064] In some implementations, viral nucleic acid may be detected directly from a raw or crude sample. For example, a raw saliva sample can be collected from the patient and heat-treated, such as by placing the raw saliva sample on a heat block/water bath set to a temperature of about 95° C. for 30 minutes. The heating step can provide many benefits, including, for example, denaturing nucleases such as RNase within the saliva that may interfere with accurate assessments of viral presence. Heating the raw saliva sample can also break down the mucus, making the sample more amenable to manipulation with laboratory equipment such as pipettes. The high heat can also cause thermal disruption of any prokaryotic and eukaryotic cells present in the sample and can also disrupt enveloped viruses and/or viral capsids present in the sample and thereby increase accessibility to any viral nucleic acid.

[0065] The heat-treated sample may also be mixed (e.g., via vortexing the sample for at least 10 seconds) before and/or after equilibrating the heat-treated sample to room temperature. A lysis solution can then be prepared and combined (e.g., in 1:1 proportions) with the heat-treated sample to create a probative template solution for detecting the presence of viral nucleic acid within the sample via nucleic acid amplification reactions (e.g., PCR, RT-PCR, qPCR, RT-qPCR, or the like). The lysis solution can include a nucleic-acid-amenable buffer such as TBE (and/or suitable alternative known in the art) combined with a detergent and/or emulsifier such as Tween-20, the polysorbate-type nonionic surfactant (and/or suitable alternative known in the art). The detergent and/or emulsifier can promote better mixing of the reagents and may also act to increase accessibility to any viral nucleic acid within the sample (e.g., by removing lipid envelopes from virions).

[0066] It should be appreciated that in some embodiments, the disclosed compositions can include the sample mixed with a buffer and detergent/emulsifier. The sample can be added to a buffer/detergent mixture or vice versa. In some embodiments, the sample is combined with a buffer and then detergent is added to the saliva/buffer mixture. In other embodiments, the sample is directly combined with a buffer/detergent mixture. As a non-limiting example, a set of patient samples can be prepared as compositions for downstream analysis and detection of viral sequence by adding a volume of heat-treated sample for each patient into one (or a plurality) of wells in a multi-well plate. A volume of a buffer/detergent mixture (e.g., TBE+Tween-20) can then be added to each well containing a patient sample. Alternatively, a multi-well plate can be loaded with a volume of a buffer/detergent mixture into which a volume of heat-treated saliva is added. Once combined, this probative template solution can be used immediately or stored for later analysis. Such probative template solutions can also be combined with PCR reagents (e.g., buffers, dNTPs, master mixes, etc.) prior to or after storage.

[0067] In some embodiments, a sample is obtained from multiple organisms (e.g., a plurality of individuals or patients) and the multiples samples are pooled together to make a single pooled sample for testing. In some embodiments, a sample may be obtained from at least two different organisms or individuals for pooling together to form a single sample for testing. In some embodiments, a sample may be obtained from between 2 to 10 different organisms or individuals for pooling together to form a single sample for testing. In some embodiments, a sample may be obtained from 2, 3, 4, 5, 6, 7, 8, 9, or 10 different organisms or individuals for pooling together to form a single sample for testing. In some embodiments, a sample may be obtained from up to and including 6 different organisms or individuals for pooling together to form a single sample for testing. For example, a sample used for testing, according to the methods and compositions described herein, may comprise a multiplicity of samples obtained from different organisms or individuals (e.g., 2, 3, 4, 5, or 6 different individuals) which are combined together to form a single “pooled” sample used for subsequent detection of a pathogen such as SARS-CoV-2.

### Nucleic Acid Amplification & Detection

[0068] Amplified products (“amplicons”) resulting from use of one or more embodiments described herein can be generated, detected, and/or analyzed using any suitable method and on any suitable platform. In some embodiments, SARS-CoV-2 or other target organism is detected by analysis of swabs, or fluid obtained from swabs, such as throat swabs, nasal swabs, nasopharyngeal swabs, cheek swabs, saliva swabs, or other swabs. SARS-CoV-2, other coronaviruses, or other target organisms may additionally or alternatively be detected by analysis of saliva samples, buccal samples, nasal samples, nasal pharyngeal samples, blood samples, urine samples, semen samples, or other biological samples.

[0069] In some embodiments, the nucleic acid assays as described herein can be used to detect, identify, characterize, quantify, or otherwise measure one or more nucleic acid targets in a sample. In some embodiments, the nucleic acid targets may be single-stranded, double-stranded, or any other nucleic acid molecule of any size or conformation. Optionally, the nucleic acid assays described herein can include polymerase chain reaction (PCR) assays (see, e.g., U.S. Pat. No. 4,683,202), loop-mediated isothermal amplification (“LAMP”) (see, e.g., U.S. Pat. No. 6,410,278), and other methods, including methods discussed below for detecting nucleic acid targets in a sample. In some embodiments, the PCR assays can be real time PCR or quantitative (qPCR) assays. In some other embodiments, the PCR assays can be end point PCR assays. Nucleic acid markers may be detected by any suitable means, including means that include nucleic acid amplification (e.g., thermal cycling amplification methods including PCR, and other nucleic acid amplification methods; isothermal amplification methods, including LAMP, etc.) and any other method that can be used to detect the presence of nucleic acid markers indicative of a disease-causing organism in a sample.

[0070] In some embodiments, the primers described herein are used in nucleic acid assays at a concentration from about 100 nM to 1 mM (e.g., 300 nM, 400 nM, 500 nM, etc.), including all concentration amounts and ranges in between. In some embodiments, the probes described herein are used in a nucleic acid assay at a concentration from about 50 nM to 500 nM (e.g., 75 nM, 125 nM, 250 nM, etc.), including all concentration amounts and ranges in between.

[0071] The primers and/or probes described herein may further comprise a fluorescent or other detectable label. In some embodiments the primers and/or probes may further comprise a quencher and in other embodiments the probes may further comprise a minor groove binder (MGB) moiety. Suitable fluorescent labels include but are not limited to 6FAM, ABY, VIC, JUN, FAM. Suitable quenchers include but are not limited to QSY (e.g., QSY7 and QSY21), BHQ (Black Hole Quencher) and DFQ (Dark Fluorescent Quencher).

[0072] In some multiplex assay embodiments, various SARS-CoV-2 genomic regions are detected, including assays for the SARS-CoV-2 Orf region (e.g., Orf1a, Orf1b, Orf1ab, Orf8), N Protein, S Protein, other genomic regions, and/or combinations thereof. Such multiplex assay embodiments may include multiple different probes for the same target genomic region in order to detect and/or distinguish between SARS-CoV-2 variants. For example, a multiplex assay that includes a target in the S Protein genomic region may include multiple different probes (each differentially labelled) for different variant forms of the targeted S Protein genomic region. Other target regions (including the N Protein and/or Orf regions) may also include multiple probes corresponding to different variant forms of such target regions. Optionally, in some embodiments, control sequence primers and/or probes (e.g., JUN-labeled probes), such as for amplification and/or detection of bacteriophage MS2 or human RNase P control sequences, are included in the multiplex assays using primer/probe sequences disclosed herein (and may be included as singleplex assays as well).

[0073] In some embodiments array formatted assays can be run as singleplex assays or as multiplex assays. In some embodiments, a panel of different assays may be formatted onto an array or a multi-well plate. In some embodiments, the panel can include some combination of one or more assays present in the TaqMan Array Respiratory Tract Microbiota Comprehensive Card (Thermo Fisher Scientific, Waltham, MA; Catalog No. A41238), along with one or more assays containing at least one primer or probe of FIGS. 2C-2D present in at least one well of an array or a well of a multi-well plate. In some embodiments, the panel includes assays for other circulating SARS-CoV-2 strains, including but not limited to 229E, KHU1, NL63, and OC43. In some embodiments, the disclosed methods include using the panel to profile respiratory microorganisms present in a sample taken from an organism (e.g., human) and determining the profile of respiratory microbiota present in the organism's sample. Optionally, the disclosed methods can include diagnosing an infection present in an organism (e.g., human) from which a sample is taken.

[0074] In some embodiments, a panel of different qPCR assays can be used to test for multiple strains or types of pathogens in addition to SARS-CoV-2, and variants thereof, including, but not limited to, other viral pathogens such as Influenza Type A and/or Type B, and RSV Type A and/or Type B, bacterial pathogens, and/or fungal pathogens. In some embodiments, the panel of qPCR assays can be used simultaneously to test a single patient sample or a single pooled sample comprising multiple patient samples, with each assay run in parallel in array format (“array formatted”). Optionally, different qPCR assays specific for each of the following target assays can be plated into individual wells of a single array or multi-well plate, such as for example a TaqMan Array Card (see, e.g., Thermo Fisher Scientific, Waltham, MA; Catalog Nos. 4346800 and 4342265) or a MicroAmp multi-well (e.g., 96-well, 384-well) reaction plate (see, e.g., Thermo Fisher Scientific, Waltham, MA; Catalog Nos. 4346906, 4366932, 4306737, 4326659 and N8010560). Optionally, the different qPCR assays present in different wells of an array or plate can be dried or freeze-dried in situ and the array or plate can be stored or shipped prior to use.

[0075] In some embodiments, the panel of qPCR assays includes at least one qPCR assay for detecting SARS-CoV-2 (including one or more variants described herein). In some other embodiments, the panel of qPCR assays includes at least one qPCR assay for detecting SARS-CoV-2 (including one or more variants described herein), plus at least one qPCR assay for detecting one or more of respiratory microorganisms listed in Table 5, below. Each qPCR assay can include a forward primer and a reverse primer for each target. Optionally, the assay can further include one or more probes.

TABLE 5
Respiratory Microorganisms

| | | | | |
|---|---|---|---|---|
| AdV 1 of 2 | FluB (pan) | CoV HKU1 | Parecho V | M. catarrhalis |
| AdV 2 of 2 | hPIV1 | CoV NL63 | SARS-CoV-2-1 | M. pneumoniae |
| HBoV | hPIV2 | CoV OC43 | Bordetella spp. | S. aureus |
| HHV3 | hPIV3 | Mumps | B. holmesii | S. pneumoniae |
| HHV4 | hPIV4 | MERS-CoV | B. pertussis | P. jirovecii |
| HHV5 | RSVA | SARS-CoV | SARS-CoV-2-2 | SARS-CoV-2-3 |
| HHV6 | RSVB | Entero V (pan) | C. pneumoniae | Internal Control |
| FluA (pan) | hMPV | Entero V D68 | H. influenzae | (IC) - RNase P |
| FluA (H1) | Measles | RhinoV 1of2 | K. pneumoniae | |
| FluA (H3) | CoV 229E | Rhino V 2of2 | L. pneumophila | |

[0076] In some embodiments, the multiplex assay detects two or more (e.g., 2, 3, 4, 5, 6, etc.) of the targets of Table 5. In some embodiments, the multiplex assay detects one or more targets within the SARS-CoV-2 genome (e.g., including reference and/or mutant or variant SARS-CoV-2 targets) as wells an internal positive control, such as RNase P.

[0077] In some other embodiments, the primers and/or probes provided in FIGS. 2C-2D can be used to amplify one or more specific target sequences present in a SARS-CoV-2 target and to enable identification or differentiation between different SARS-CoV-2 variants, such as those described in Table 4, (including differentiation between a mutant/variant and reference form SARS-CoV-2 target).

[0078] The primer and probe sequences described herein need not have 100% homology/identity to their targets to be effective, though in some embodiments, homology is substantially 100% or exactly 100%. In some embodiments, one or more of the disclosed primer and/or probe sequences have a homology to their respective target of at least about 50%, at least about 60%, at least about 70%, at least about 75%, at least about 80%, at least about 85%, at least about 90%, at least about 95%, at least about 97%, at least about 98%, at least about 99%, at least about 99.9%, or up to substantially 100% or exactly 100%. Some combinations of primers and/or probes may include primers and/or probes each with different homologies to their respective targets, and the homologies may be, for example, within a range with endpoints defined by any two of the foregoing values.

[0079] PCR and related methods are common methods of nucleic acid amplification. PCR is one, but not the only, example of a nucleic acid polymerase reaction method for amplifying a nucleic acid test sample comprising the use of a known nucleic acid as a primer and a nucleic acid polymerase to amplify or generate a specific target nucleic acid. In general, PCR utilizes a primer pair that consists of a forward primer and a reverse primer configured to amplify a target segment of a nucleic acid template. Typically, but not always, the forward primer hybridizes to the 5′ end of the target sequence and the reverse primer will be identical to a sequence present at the 3′ end of the target sequence. The reverse primer will typically hybridize to a complement of the target sequence, for example an extension product of the forward primer and/or vice versa. PCR methods are typically performed at multiple different temperatures, causing repeated temperature changes during the PCR reaction (“thermal cycling”). Other amplification methods, such as, e.g., LAMP methods, and other isothermal methods, such as those listed in Table 6, may require less or less extensive thermal cycling than does PCR, or require no thermal cycling. Such isothermal amplification methods are also contemplated for use with the assay compositions, kits, and methods described herein.

TABLE 6
Summary of optional isothermal amplification methods.

| | |
|---|---|
| NASBA | Nucleic acid sequence-based amplification (NASBA) is a method |
| | used to amplify RNA. |
| LAMP | Loop-mediated isothermal amplification (LAMP) is a single tube |
| | technique for the amplification of DNA. It typically uses 4-6 primers, which |
| | form loop structures to facilitate subsequent rounds of amplification. |
| HDA | Helicase-dependent amplification (HDA) uses the double-stranded |
| | DNA unwinding activity of a helicase to separate strands for in vitro DNA |
| | amplification at constant temperature. |
| RCA | Rolling circle amplification (RCA) starts from a circular DNA |
| | template and a short DNA or RNA primer to form a long single stranded |
| | molecule. |
| MDA | Multiple displacement amplification (MDA) is a technique that |
| | initiates when multiple random primers anneal to the DNA template and the |
| | polymerase amplifies DNA at constant temperature. |
| WGA | When MDA is used to amplify DNA from a whole genome of a cell it |
| | is called whole genome amplification (WGA). (Other methods of WGA |
| | include MALBAC, LIANTI, DOP-PCR.) |
| RPA | Recombinase polymerase amplification (RPA) is a low temperature |
| | DNA and RNA amplification technique. |

[0080] Methods of performing PCR are well known in the art; nevertheless, further discussion of PCR and other methods may be found, for example, in Molecular Cloning: A Laboratory Manual by Green and Sambrook, Cold Spring Harbor Laboratory Press, 4th Edition 2012, which is incorporated by reference herein in its entirety.

[0081] SARS-CoV-2 has a single-stranded positive-sense RNA genome. In some embodiments, therefore, the amplification reaction (e.g., LAMP or PCR) can be combined with a reverse transcription (RT) reaction, such as in RT-LAMP or RT-PCR to convert the RNA genome to a cDNA template. The cDNA template is then used to create amplicons of the target sequences in the subsequent amplification reactions. In some embodiments, RT-PCR is performed using samples comprising virus particles or suspected of comprising virus particles. In some embodiments, the viral particles are live particles. In some embodiments, the viral particles are dead or inactivated particles. In some embodiments, the RT-PCR may be a one-step procedure using one or more primers and one or more probes as described herein. In some embodiments, the RT-PCR may be carried out in a single reaction tube, reaction vessel (e.g., “single-tube” or “1-tube” or “single-vessel” reaction). In some embodiments, the RT-PCR may be carried out in a multi-site reaction vessel, such as a multi-well plate or array. In some embodiments, RT and PCR are performed in the same reaction vessel or reaction site, such as in 1-step or 1-tube RT-qPCR. Suitable exemplary RTs can include, for instance, a Moloney Murine Leukemia Virus (M-MLV) Reverse transcriptase, SuperScript Reverse Transcriptases (Thermo Fisher Scientific), SuperScript IV Reverse Transcriptases (Thermo Fisher Scientific), or Maxima Reverse Transcriptases (Thermo Fisher Scientific), or modified forms of any such RTs.

[0082] In some embodiments, different assay products (e.g., amplicons from different variants) can be independently detected or at least discriminated from each other. For example, different assay products may be distinguished optically (e.g., using optically different labels for each qPCR assay) or can be discriminated using some other suitable method, including as described in U.S. Patent Publication No. 2019/0002963, which is incorporated herein by reference in its entirety. In some embodiments, specific combinations of labels are used to differentiate between different SARS-CoV-2 variants. For example, different SARS-CoV-2 variants may be differentiated from one another using different labels specific to each variant such that the label is detectable only in the presence—and amplification—of the associated variant sequence.

[0083] In some embodiments, the assays disclosed herein are used to create a panel of different assays for use in SNP genotyping methods. In some embodiments, the panel comprises two or more assays selected from FIG. 2C-2D. In some embodiments, the assays disclosed herein are used in methods for identifying the presence or absence of one or more clinically relevant mutations associated with an emergent SARS-CoV-2 variant. In some embodiments, the emergent SARS-CoV-2 variant includes B.1.617.2, B.1.1.7, and/or B.1.351 variants. In some embodiments, the emergent SARS-CoV-2 variant is selected from a variant listed in Table 4. In some embodiments, the one or more clinically relevant mutations are selected from a mutation listed in Table 4 and/or in FIGS. 2C-2D. In some embodiments, clinically relevant mutations are selected from the 69/70 deletion, N501Y, N439K, E484K, K417N, A222V, D614G, Y453F, P681R, and P681H mutations. In some embodiments, the panel of assays can detect up to 20 clinically relevant gene mutations or SNPs. In some embodiments, the assays disclosed herein are used in methods for identification of SARS-CoV-2 variant mutations in symptomatic and/or asymptomatic patients. In some embodiments, the assays disclosed herein are used for identification of patients who are COVID-19 positive. In some embodiments, the assays disclosed herein are used for profiling one or more SARS-CoV-2 variants. In some embodiments, the variant profiling is based on a particular pattern of detected mutations, such as those disclosed in Table 4 and FIGS. 2C-2D.

[0084] Each assay embodiment described herein may be used independently to identify a particular SARS-CoV-2 mutation. Alternatively, a panel of multiple assays may be used to identify the presence (or absence) of multiple mutations. A particular SARS-CoV-2 mutation may be characteristic of multiple SARS-CoV-2 variants, and thus while detection of such a mutation may illustrate that a sample includes a SARS-CoV-2 variant, it may not, by itself, allow for complete identification of the particular variant involved. Moreover, many SARS-CoV-2 variants have multiple mutations at multiple genomic regions. Thus, while a single assay can function to identify the presence (or absence) of a particular mutation, multiple assays can function together to identify a set of particular mutations that can together identify a particular variant and/or resolve between different variants that have overlapping mutation profiles. As such, in some embodiments, multiple assays disclosed herein, when used in combination, can be used in methods to provide a SARS-CoV-2 variant profile.

[0085] As a particular example, the B.1.1.7 variant and the B.1.351 variant are two notable variants. While each of these variants have the S gene N501Y.A_T mutation, the B.1.1.7 variant has the 69/70 S gene deletion mutation while the B.1.351 variant does not, and the B.1.351 variant has the S gene E484K.G_A mutation while the B.1.1.7 variant does not (see Table 4). Thus, an assay panel configured to test for at least two of the S gene N501Y.A_T mutation, the 69/70 S gene deletion mutation, and the S gene E484k.G_A mutation can aid in identifying these variants and/or resolving between these variants, despite some overlap in each of their respective mutation profiles. Of course, other assays focusing on additional and/or alternative distinguishing target mutation loci may be also be utilized. Various assay panels including two or more of the assays shown in FIGS. 2C and 2D may be designed to identify targeted variants and/or to resolve between variants.

[0086] In some embodiments, the amplifying step can include performing qPCR, as that term is defined herein. qPCR is a sensitive and specific method for detecting and optionally quantifying amounts of starting nucleic acid template (e.g., coronaviral nucleic acid) in a sample. Methods of qPCR are well known in the art; one leading method involves the use of a specific hydrolysis probe in conjunction with a primer pair. The hydrolysis probe can include an optical label (e.g., fluorophore) at one end and a quencher that quenches the optical label at the other end. In some embodiments, the label is at the 5′ end of the probe and cleavage of the 5′ label occurs via 5′ hydrolysis of the probe by the nucleic acid polymerase as it extends the forward primer towards the probe binding site within the target sequence. The separation of the probe label from the probe quencher via cleavage (or unfolding) of the probe results in an increase in optical signal which can be detected and optionally quantified. The optical signal can be monitored over time and analyzed to determine the relative or absolute amount of starting nucleic acid template present in the sample. Suitable labels are described herein.

[0087] The reaction vessel or volume can optionally include a tube, channel, well, cavity, site or feature on a surface, or alternatively a droplet (e.g., a microdroplet or nanodroplet) that may be deposited onto a surface or into a surface well or cavity, or suspended within (or partially bounded by) a fluid stream. In some embodiments, the reaction volume includes one or more droplets arrayed on a surface or present in an emulsion. The reaction volumes can optionally be formed by fusion of multiple pre-reaction volumes containing different components of an amplification reaction. For example, pre-reaction volumes containing one or more primers can be fused with pre-reaction volumes containing human nucleic acid samples and/or polymerase enzymes, nucleotides, and buffer. In some embodiments involving performing qPCR reactions in array format, a surface contains multiple grooves, channels, wells, cavities, sites, or features defining a reaction volume containing one or more amplification reagents (e.g., primers, probes, buffer, polymerase, nucleotides, and the like). In some array-formatted singleplex embodiments, the reaction volume within the selected tubes, grooves, channels, wells, cavities, sites, or features contains only a single forward primer sequence and a single reverse primer sequence. Optionally, one or more probe sequences are also included in the singleplex reaction volume.

[0088] In some array-formatted multiplex embodiments, the reaction volume within the selected tubes, grooves, channels, wells, cavities, sites, or features contains multiple (e.g., 2, 3, 4, 5, 6, etc.) forward and reverse primer sequences and/or multiple probe sequences. For instance, exemplary methods for polymerizing and/or amplifying and detecting nucleic acids suitable for use as described herein are commercially available as TaqMan assays (see, e.g., U.S. Pat. Nos. 4,889,818; 5,079,352; 5,210,015; 5,436,134; 5,487,972; 5,658,751; 5,210,015; 5,487,972; 5,538,848; 5,618,711; 5,677,152; 5,723,591; 5,773,258; 5,789,224; 5,801,155; 5,804,375; 5,876,930; 5,994,056; 6,030,787; 6,084,102; 6,127,155; 6,171,785; 6,214,979; 6,258,569; 6,814,934; 6,821,727; 7,141,377; and/or 7,445,900, all of which are hereby incorporated herein by reference in their entirety).

[0089] TaqMan assays are typically carried out by performing nucleic acid amplification on a target polynucleotide using a nucleic acid polymerase having 5′-to-3′ nuclease activity, a primer capable of hybridizing to the target polynucleotide, and an oligonucleotide probe capable of hybridizing to said target polynucleotide 3′ relative to the primer. The oligonucleotide probe typically includes a detectable label (e.g., a fluorescent reporter molecule) and a quencher molecule capable of quenching the fluorescence of the reporter molecule. Typically, the detectable label and quencher molecule are part of a single probe. As amplification proceeds, the polymerase digests the probe to separate the detectable label from the quencher molecule. The detectable label is monitored during the reaction, where detection of the label corresponds to the occurrence of nucleic acid amplification (e.g., the higher the signal the greater the amount of amplification). Variations of TaqMan assays are known in the art and would be suitable for use in the methods described herein.

[0090] For example, a singleplex or multiplex qPCR can include a single TaqMan assay associated with a locus-specific sequence or multiple TaqMan assays respectively associated with a plurality of loci in a multiplex format. As a non-limiting example, a 4-plex reaction can include FAM (emission peak ˜517 nm), VIC (emission peak ˜551 nm), ABY (emission peak ˜580 nm), and JUN (emission peak ˜617 nm) dyes. In some embodiments, each dye is associated with one or more target sequences. In some embodiments, one or more dyes are quenched by a QSY quencher (e.g., QSY21). In some embodiments, each multiplex reaction allows up to 12 targets to be amplified and tracked real-time within a single reaction vessel. In some embodiments, up to 2, 4, 6, 8, 10, or 12 targets are amplified and tracked real-time within a single reaction vessel, using any combination of detectable labels disclosed herein or otherwise known to those of skill in the art. The reporter dyes are optimized to work together with minimal spectral overlap for improved performance. Any combination of dyes described herein can additionally be combined with other dyes (e.g., Mustang Purple (emission peak ˜654 nm) or one or more Alexa Fluors (e.g., AF647 and AF676)), for use in monitoring fluorescence of a control or for use in a non-emission-spectrum-overlapping 5-plex assay. In addition, the QSY quencher is fully compatible with probes that have minor-groove binder quenchers.

[0091] Where multiple detection channels are utilized, it is desirable to minimize crosstalk between fluorescence reporters and select reporters that avoid excessive spectral overlap. One example of an assay that includes 5 detection channels incorporates the dyes FAM, ABY, VIC, and JUN, along with Mustang Purple (emission peak ˜654 nm) or an appropriate Alexa Fluor, for example. The dyes may be associated with a corresponding primer and/or with a probe of the assay, as described herein. Other embodiments may utilize other combinations of dyes to define different sets of detection channels (including in assays with more than 5 detection channels) according to particular preferences or application needs. Additional examples of multiplex assays (including related dye compounds, compositions, methods, and kits) are described in U.S. Provisional Patent Application No. 62/705,935, filed Jul. 23, 2020 and titled “Compositions, Systems and Methods for Biological Analysis Involving Energy Transfer Dye Conjugates and Analytes Comprising the Same”, which is incorporated herein by this reference in its entirety.

[0092] Detector probes may be associated with alternative quenchers, including without limitation, dark fluorescent quencher (DFQ), black hole quenchers (BHQ), Iowa Black, QSY quencher, and Dabsyl and Dabcel sulfonate/carboxylate Quenchers. Detector probes may also include two probes, wherein, for example, a fluorophore is associated with one probe and a quencher is associated with a complementary probe such that hybridization of the two probes on a target quenches the fluorescent signal or hybridization on the target alters the signal signature via a change in fluorescence. Detector probes may also include sulfonate derivatives of fluorescein dyes with SO₃ instead of the carboxylate group, phosphoramidite forms of fluorescein, phosphoramidite forms of Cy5.

[0093] It should be appreciated that when using more than one detectable label, particularly in a multiplex format, each detectable label preferably differs in its spectral properties from the other detectable labels used therewith such that the labels may be distinguished from each other, or such that together the detectable labels emit a signal that is not emitted by either detectable label alone. Exemplary detectable labels include, for instance, a fluorescent dye or fluorophore (e.g., a chemical group that can be excited by light to emit fluorescence or phosphorescence), “acceptor dyes” capable of quenching a fluorescent signal from a fluorescent donor dye, and the like, as described above. Suitable detectable labels may include, for example, fluoresceins (e.g., 5-carboxy-2,7-dichlorofluorescein; 5-Carboxyfluorescein (5-FAM); 5-Hydroxy Tryptamine (5-HAT); 6-JOE; 6-carboxyfluorescein (6-FAM); Mustang Purple, VIC, ABY, JUN; FITC; 6-carboxy-4′,5′-dichloro-2′,7′-dimethoxy¬fluorescein (JOE)); 6-carboxy-1,4-dichloro-2′,7′-dichloro-fluorescein (TET); 6-carboxy-1,4-dichloro-2′,4′,5′,7′-tetra-chlorofluorescein (HEX); Alexa Fluor fluorophores (e.g., 350, 405, 430, 488, 500, 514, 532, 546, 555, 568, 594, 610, 633, 635, 647, 660, 680, 700, 750); BODIPY fluorophores (e.g., 492/515, 493/503, 500/510, 505/515, 530/550, 542/563, 558/568, 564/570, 576/589, 581/591, 630/650-X, 650/665-X, 665/676, FL, FL ATP, FI-Ceramide, R6G SE, TMR, TMR-X conjugate, TMR-X, SE, TR, TR ATP, TR-X SE), Cascade Blue, Cascade Yellow; CyM dyes (e.g., 3, 3.18, 3.5, 5, 5.18, 5.5, 7), cyan GFP, cyclic AMP Fluorosensor (FiCRhR), fluorescent proteins (e.g., green fluorescent protein (e.g., GFP. EGFP), blue fluorescent protein (e.g., BFP, EBFP, EBFP2, Azurite, mKalamal), cyan fluorescent protein (e.g., ECFP, Cerulean, CyPet), yellow fluorescent protein (e.g., YFP, Citrine, Venus, YPet), FRET donor/acceptor pairs (e.g., fluorescein/fluorescein, fluorescein/tetramethylrhodamine, IAEDANS/fluorescein, EDANS/dabcyl, BODIPY FL/BODIPY FL, Fluorescein/QSY7 and QSY9), LysoTracker and LysoSensor (e.g., LysoTracker Blue DND-22, LysoTracker Blue-White DPX, LysoTracker Yellow HCK-123, LysoTracker Green DND-26, LysoTracker Red DND-99, LysoSensor Blue DND-167, LysoSensor Green DND-189, LysoSensor Green DND-153, LysoSensor Yellow/Blue DND-160, LysoSensor Yellow/Blue 10,000 MW dextran), Oregon Green (e.g., 488, 488-X, 500, 514); rhodamines (e.g., 110, 123, B, B 200, BB, BG, B extra, 5-carboxytetramethylrhodamine (5-TAMRA), 5 GLD, 6-Carboxyrhodamine 6G, Lissamine, Lissamine Rhodamine B, Phallicidine, Phalloidine, Red, Rhod-2, ROX (6-carboxy-X-rhodamine), 5-ROX (carboxy-X-rhodamine), Sulphorhodamine B can C, Sulphorhodamine G Extra, TAMRA (6-carboxytetramethyl,rhodamine), Tetramethylrhodamine (TRITC), WT), Texas Red, Texas Red-X, among others as would be known to those of skill in the art.

[0094] Other detectable labels may be used in addition to or as an alternative to labelled probes. For example, primers can be labeled and used to both generate amplicons and to detect the presence (or concentration) of amplicons generated in the reaction, and such may be used in addition to or as an alternative to labeled probes described herein. As a further example, primers may be labeled and utilized as described in Nazarenko et al. (Nucleic Acids Res. 2002 May 1; 30(9): e37), Hayashi et al. (Nucleic Acids Res. 1989 May 11; 17(9): 3605), and/or Neilan et al. (Nucleic Acids Res. Vol. 25, Issue 14, 1 Jul. 1997, pp. 2938-39). Those of skill in the art will also understand and be capable of utilizing the PCR processes (and associated probe and primer design techniques) described in Zhu et al. (Biotechniques. 2020 July: 10.2144/btn-2020-0057).

[0095] Any of these systems and detectable labels, as well as many others, may be used to detect amplified target nucleic acids. In some embodiments, intercalating labels can be used such as ethidium bromide, SYBR Green I, SYBR GreenER, and PicoGreen (Life Technologies Corp., Carlsbad, CA), thereby allowing visualization in real-time, or end point, of an amplification product in the absence of a detector probe. In some embodiments, real-time visualization may include both an intercalating detector probe and a sequence-based detector probe. In some embodiments, the detector probe is at least partially quenched when not hybridized to a complementary sequence in the amplification reaction and is at least partially unquenched when hybridized to a complementary sequence in the amplification reaction. In some embodiments, probes may further comprise various modifications such as a minor groove binder to further provide desirable thermodynamic characteristics.

[0096] In some embodiments, the amplicon is labeled by incorporation of or hybridization to labeled primer. In some embodiments, the amplicon is labeled by hybridization to a labeled probe. In some embodiments, the amplicon is labeled by binding of a DNA-binding dye. In some embodiments, the dye may be a single-strand DNA binding dye. In other embodiments, the dye may be a double-stranded DNA binding dye. In other embodiments, the amplicon is labeled via polymerization or incorporation of labeled nucleotides in a template-dependent (or template-independent) polymerization reaction. This can be part of the amplifying step or alternatively the labeled nucleotide can be added after amplifying is completed. The labeled amplicon (or labeled derivative thereof) can be detected using any suitable method such as, for example, electrophoresis, hybridization-based detection (e.g., microarray, molecular beacons, and the like), chromatography, NMR, and the like.

[0097] In one exemplary embodiment, the labeled amplicon is detected using capillary electrophoresis. In another embodiment, the labeled amplicon is detected using qPCR. In some embodiments, a plurality of different amplicons is formed, and optionally labeled, within a single reaction volume via a single amplification reaction. For example, a multiplex reaction (e.g., 2-plex, 3-plex, 4-plex, 5-plex, 6-plex) carried out in a single tube or reaction vessel (e.g., “single-tube” or “1-tube” or “single-vessel” reaction) can produce a plurality of amplicons that are labeled. In some embodiments, the plurality of amplicons can be differentially labeled. In some embodiments, each of the plurality of amplicons produced during amplification is labeled with a different label.

[0098] Optionally, in some embodiments, a control template and/or assay, such as bacteriophage MS2 or RNase P control, is included in the kit. If the positive control sequence is an endogenously-derived control, such as RNase P, the presence of patient-derived nucleic acid (e.g., genomic DNA coding for RNase P, RNase P RNA, and/or reverse transcribed RNase P transcript), can be used as the template for an RNase P qPCR assay. Exemplary primers and probes for such an RNase P and MS2 positive controls can include sequences of SEQ ID NO:7305-SEQ ID NO:7310, although those having skill in the art should appreciate that other RNase-P-specific primers and/or probes could be used. If the positive control sequence is an exogenously derived control, such as a component of the MS2 bacteriophage, a known or predetermined concentration of template nucleic acid is added to the reaction volume to serve as the requisite template for an MS2 qPCR assay.

[0099] In some embodiments, the nucleic acid amplification assays as described herein are performed using a Real-time PCR (qPCR) instrument, including for example a QuantStudio Real-Time PCR system, such as the QuantStudio 5 RealTime PCR System (QS5), QuantStudio 7 RealTime PCR System (QS7), and/or QuantStudio 12K Flex System (QS12K), or a 7500 Real-Time PCR system, such as the 7500 Fast Dx system, from Thermo Fisher Scientific.

[0100] In some embodiments, the systems, compositions, methods, and devices used for nucleic acid amplification comprise a “point-of-service” (POS) system. In some embodiments, samples may be collected and/or analyzed at a “point-of-care” (POC) location. In some embodiments, analysis at a POC location typically does not require specialized equipment and has rapid and easy-to-read visual results. In some embodiments, analysis can be performed in the field, in a home setting, and/or by a lay person not having specialized skills. In certain embodiments, for example, the analysis of a small-volume clinical sample may be completed using a POS system in a short period of time (e.g., within hours or minutes).

[0101] Optionally, a POS system is utilized at a location that is capable of providing a service (e.g., testing, monitoring, treatment, diagnosis, guidance, sample collection, verification of identity (ID verification), and other services) at or near the site or location of the subject. A service may be a medical service or it may be a non-medical service. In some situations, a POS system provides a service at a predetermined location, such as a subject's home, school, or work, or at a grocery store, a drug store, a community center, a clinic, a doctor's office, a hospital, an outdoor triage tent, a makeshift hospital, a border check point, etc. A POS system can include one or more point of service devices, such as a portable virus/pathogen detector. In some embodiments, a POS system is a point of care system. In some embodiments, the POS system is suitable for use by non-specialized workers or personnel, such as nurses, police officers, civilian volunteers, or the patient.

[0102] In certain embodiments, a POC system is utilized at a location at which medical-related care (e.g., treatment, testing, monitoring, diagnosis, counseling, etc.) is provided. A POC may be, e.g., at a subject's home, work, or school, or at a grocery store, a community center, a drug store, a doctor's office, a clinic, a hospital, an outdoor triage tent, a makeshift hospital, a border check point, etc. A POC system is a system which may aid in, or may be used in, providing such medical-related care, and may be located at or near the site or location of the subject or the subject's health care provider (e.g., subject's home, work, or school, or at a grocery store, a community center, a drug store, a doctor's office, a clinic, a hospital, etc.).

[0103] In embodiments, a POS system is configured to accept a clinical sample obtained from a subject at the associated POS location. In embodiments, a POS system is further configured to analyze the clinical sample at the POS location. In embodiments, the clinical sample is a small volume clinical sample. In embodiments, the clinical sample is analyzed in a short period of time. In embodiments, the short period of time is determined with respect to the time at which sample analysis began. In embodiments, the short period of time is determined with respect to the time at which the sample was inserted into a device for the analysis of the sample. In embodiments, the short period of time is determined with respect to the time at which the sample was obtained from the subject.

[0104] In some embodiments, a POS system or a POC system can include the amplification-based methods, compositions and kits disclosed herein, including any of the described assays and/or assay panels. Such assays are contemplated for use with both thermal cycling amplification workflows and protocols, such as in PCR, as well as isothermal amplification workflows and protocols, such as in LAMP.

[0105] In some embodiments, a POS or a POC system comprises self-collection of a biological sample, such as a nasal swab or a saliva sample. In some embodiments, the self-collection may comprise the use of a self-collection kit and/or device, such as a swab or a tube (e.g., a saliva collection tube or similar saliva collection device). In some embodiments, the self-collection kit comprises instructions for use, including collection instructions, sample preparation or storage instructions, and/or shipping instructions. For example, the self-collection kit and/or device may be used by an individual, such as lay person, not having specialized skills or medical expertise. In some embodiments, self-collection may be performed by the patient themselves or by any other individual in proximity to the patient, such as but not limited to a parent, a care giver, a teacher, a friend, or other family member.

[0106] Notably, in some embodiments, the nucleic acid amplification protocol can be configured for rapid processing (e.g., in less than about 45 minutes) and high throughput, allowing for a minimally invasive method to quickly screen large numbers of individuals in a scalable way. This can be particularly useful to perform asymptomatic testing (e.g., high frequency/widespread testing at schools, workplaces, conventions, sporting events, large social gatherings, etc.) or for epidemiological purposes. The disclosed embodiments can also beneficially provide a lower cost sample collection system and method that enables self-collection (reducing health care professional staffing needs) using a low-cost collection device. This eliminates the requirements for swabs, buffers, virus transmission media (or other specialized transport medium), and the like. The disclosed embodiments also allow for a reduction in Personal Protective Equipment (PPE) requirements and costs. Because the reagents and methods are streamlined (e.g., no precursor nucleic acid purification and/or extraction step), there is a reduced use of nucleic acid preparation plastics which brings a coincident reduction in reagent costs and inventory costs. There is also a beneficial reduced dependence on supply-constrained items, and the compatibility of these methods and kit components with existing equipment improves the flexibility and simplicity of their implementation to the masses. Overall, such embodiments allow for a less expensive assay that can be accomplished more quickly from sample collection through result generation.

[0107] Some embodiments relate to kits containing one or more of the primers and probes disclosed in FIGS. 2C-2D. Optionally, the kit can further include a master mix. In some embodiments, the master mix is TaqMan Fast Virus 1-Step Master Mix (Thermo Fisher Scientific, Waltham, MA, Catalog No. 44444432). In some embodiments, the master mix is TaqPath 1-Step RT-qPCR Master Mix, CG (Thermo Fisher Scientific, Waltham, MA, Catalog No. A15299). In other embodiments the master mix is TaqPath™ 1 Step Multiplex Master Mix (No ROX™) (Thermo Fisher Scientific, Waltham, MA, Catalog No. A48111, A28521). In some embodiments, the kit includes primers, probes and master mix sufficient to constitute a reaction mixture supporting amplification of one or more target regions from SARS-CoV-2 and/or variant thereof (e.g., reference and one or more mutants/variants). Target regions can include the genes encoding the N protein, the S protein, and/or Orf proteins.

[0108] In some array-based embodiments, two or more different qPCR assays (each containing a forward primer, a reverse primer and optionally a probe) are used in a single well, cavity, site or feature of the array and products of each assay can be independently detected. For example, different assay products may be discriminated optically (e.g., using different labels present in components each assay) or using some other suitable method, including as described in U.S. Patent Publication No. 2019/0002963, incorporated by reference herein. In some embodiments, at least one primer of each assay contains an optically detectable label that can be discriminated from the optical label of at least one other assay.

[0109] In some embodiments, at least one of the qPCR assays targets a sequence within a gene encoding the N protein, the S protein, and/or an Orf protein (e.g., ORF1a, ORF1b, Orf1ab, Orf8). In some embodiments, the target sequence within N protein, S protein, and/or the Orf genes (e.g., Orf1a, Orf1b, Orf1ab, Orf8) is a reference form sequence. In some embodiments, the target sequence within N protein, S protein, and/or the Orf genes (e.g., Orf1a, Orf1b, Orf1ab, Orf8) is a variant or mutant sequence. In some embodiments, the reaction volume further includes a second qPCR assay that targets a different gene of the group from the first. In some embodiments, the reaction volume further includes a third qPCR assay that targets the third gene from the group, such that when the reaction volume is subjected to amplification conditions and if the sample includes SARS-CoV-2 genomic RNA, at least one amplicon is produced from genetic sequence encoding the S protein, at least one amplicon from genetic sequence encoding the N protein and at least one amplicon from the genetic sequence encoding the Orf genes (e.g., Orf1a, Orf1b, Orf1ab, Orf8). In other embodiments, the reaction volume further includes a fourth qPCR assay that targets the exogenous positive control sequence, such that when the reaction volume is subjected to amplification conditions and if the sample includes SARS-CoV-2 genomic RNA, at least one amplicon is produced from genetic sequence encoding the S protein, at least one amplicon from genetic sequence encoding the N protein, at least one amplicon from the genetic sequence encoding the Orf genes (e.g., Orf1a, Orf1b, Orf1ab, Orf8) and at least one amplicon from the exogenous positive control sequence. In some embodiments, the reaction volume further includes a fifth qPCR assay that targets two separate exogenous positive control sequences, such that when the reaction volume is subjected to amplification conditions and if the sample includes SARS-CoV-2 genomic RNA, at least one amplicon is produced from genetic sequence encoding the S protein, at least one amplicon from genetic sequence encoding the N protein, at least one amplicon from the genetic sequence encoding an Orf protein (e.g., Orf1a, Orf1b, Orf1ab, Orf8) and at least two amplicons from the two exogenous positive control sequences.

[0110] In some embodiments, optimal amplification and detectability for viral genomes is achieved by adding a master mix to the reaction volume prior to amplification. The master mix optionally includes a polymerase, nucleotides, buffers, and salts. In some embodiments (particularly multiplex assays), the reaction volume includes TaqMan Fast Virus 1-Step Master Mix (Thermo Fisher Scientific, Waltham, MA, Catalog No. 44444432). In some embodiments, the reaction volume includes TaqPath 1-Step RT-qPCR Master Mix, CG (Thermo Fisher Scientific, Waltham, MA, Catalog No. A15299). In other embodiments the master mix is TaqPath™ 1 Step Multiplex Master Mix (No ROX™) (Thermo Fisher Scientific, Waltham, MA, Catalog No. A48111, A28521).

### EXAMPLES

[0111] The following Examples may reference specific target nucleic acids, compositions, formulations, and/or process steps. It will be understood, however, that these Examples may be modified by using any of the components described elsewhere herein, including by using any of the primers and/or probes described herein.

### Example 1: Singleplex Assay for Detecting SARS-CoV-2

[0112] An exemplary protocol for detecting SARS-CoV-2 from a biological sample via a singleplex assay was performed using the TaqMan 2019-nCoV Assay Kit (Thermo Fisher Scientific, Catalog No. A47532). The assay kit included primers and FAM-labeled probes for detecting the Orf1ab, S protein, and N protein coding sequences for SARS-CoV-2. An optional VIC-labeled internal control directed to RNase P was also included. In a separate kit, the same primers/probes were included and used as positive controls to detect the target sequences from a synthetic DNA construct encoding the target sequences for Orf1ab, S protein, N protein, and RNase P.

[0113] The total nucleic acid content was isolated from samples collected via nasopharyngeal swab, nasopharyngeal aspirate, or bronchoalveolar lavage using the MagMAX Viral/Pathogen Nucleic Acid Isolation Kit (Thermo Fisher Scientific, Catalog No. A42356) in accordance with the instructions provided therewith.

[0114] For each assay, the components in Table 7 were combined for the number of reactions, plus 10% overage:

TABLE 7
RT-qPCR Reaction Mix

| Component | Volume/reaction | |
|---|---|---|
| RT-qPCR Master Mix, CG (4X) | 6.25 | μL |
| 2019 nCoV TaqMan Assay (20X) | 1.25 | μL |
| TaqMan RNase P Assay, VIC dye/QSY assay (20X) | 1.25 | μL |
| Nuclease-free water | 11.25 | μL |
| Total Reaction Mix Volume | 20.00 | μL |

[0115] The “Master Mix” referenced in Table 7 was one of TaqPath™ 1-Step RT-qPCR Master Mix, CG (Thermo Fisher Scientific, Catalog Nos. A15299 and A15300) or TaqMan™ Fast Virus 1-Step Master Mix (Thermo Fisher Scientific, Catalog Nos. 4444432, 4444434, or 4444436)

[0116] The reaction mixes were vortexed for about 10-30 seconds and centrifuged briefly. For each reaction, the components in Table 8, below, were combined in a MicroAmp™ Optical 96-Well Reaction Plate (0.2 mL/well) (Thermo Fisher Scientific, Catalog No. N8010560):

TABLE 8
RT-qPCR Reaction

| Component | Volume/reaction | |
|---|---|---|
| Reaction Mix (see Table 7) | 20.0 | μL |
| Nucleic acid sample (from extraction) or | 5.0 | μL |
| 1 μL 2019-nCoV Control construct + 4 μL | | |
| PCR-grade water or | | |
| No template control (5 μL PCR-grade water) | | |
| Total Reaction Volume | 25.0 | μL |

[0117] The plate was sealed with a MicroAmp Optical Adhesive Film (Thermo Fisher Scientific, Catalog No. 4306311) and vortexed briefly to mix the contents. The plate was centrifuged briefly to collect the contents at the bottom of the wells. The plate was loaded into a 7500 Real-Time PCR Instrument (Thermo Fisher Scientific, Catalog Nos. 4351104-4351107) and the protocol in either Table 9 or Table 10 was run, depending on the respective RT-qPCR Master Mix used to create the reaction mix.

TABLE 9
RT-qPCR Protocol using TaqPath 1-Step RT-qPCR Master Mix
RT-qPCR Protocol
TaqPath 1-Step RT-qPCR Master Mix

| Step | Stage | # of cycles | Temp. | | Time | |
|---|---|---|---|---|---|---|
| UNG incubation | 1 | 1 | 25° | C. | 2 | min |
| Reverse transcription^{†} | 2 | 1 | 50° | C.^{†} | 15 | min |
| Polymerase activation^{‡} | 3 | 1 | 95° | C.^{‡} | 2 | min |
| Amplification | 4 | 40 | 95° | C. | 3 | sec |
| | | | 60° | C. | 30 | sec |

^{†}Preferably any temperature between 48° C.-55° C.
^{‡}RT inactivation, initial denaturation, and activation of DNAP.

TABLE 10
RT-qPCR Protocol using TaqMan Fast Virus 1-Step Master Mix
RT-qPCR Protocol
TaqMan Fast Virus 1-Step Master Mix

| Step | Stage | # of cycles | Temp. | | Time | |
|---|---|---|---|---|---|---|
| Reverse transcription | 1 | 1 | 50° | C.^{†} | 5 | min |
| RT inactivation/initial | 2 | 1 | 95° | C. | 20 | sec |
| denaturation | | | | | | |
| Amplification | 3 | 40 | 95° | C. | 3 | sec |
| | | | 60° | C. | 30 | sec |

^{†}Preferably any temperature between 48° C.-55° C.

[0118] The resulting data were analyzed using the included 7500 Software v2.3. The analysis was performed using the Auto Baseline and Auto Threshold analysis settings of the software. For each plate, the control reactions were confirmed to perform as expected (i.e., the no template control had an undetermined Cₜ value and the positive control had a Cₜ value less than or equal to 30).

[0119] The Cₜ value for each individual assay was also analyzed in accordance with Table 11.

TABLE 11
Individual assay results guide

| 2019-nCOV | RNaseP | |
|---|---|---|
| assay (FAM) | assay (VIC) | Interpreted Result |
| Cₜ < 37 | Any Value | Positive. |
| 37 ≤ Cₜ < 40 | Any Value | Inconclusive. Repeat the test. |
| Cₜ = 40 or | Cₜ < 40 | Negative. |
| undetermined | | |

[0120] The results for each tested sample was interpreted to have SARS-CoV-2 RNA present if either (i) any two of the three 2019-nCoV assays were positive or (ii) any one of the 2019-nCoV assays were positive in two different samples collected from the same subject. SARS-CoV-2 RNA was not present in the sample if all three of the 2019-nCoV assays were negative.

### Example 2: Multiplex Assay for Detecting SARS-CoV-2

[0121] An exemplary protocol for detecting SARS-CoV-2 from a biological sample via a multiplex assay was performed using the TaqPath™ COVID-19 Combo Kit (Thermo Fisher Scientific, Catalog No. A47813) or the TaqPath™ COVID-19 Combo Kit Advanced (Thermo Fisher Scientific, Catalog No. A47814). The kits are similar but with some different reagent volumes for workflows of different sample volumes. The assay kit included a “COVID-19 Real Time PCR Assay Multiplex” component that included primers and FAM-labeled probes for detecting Orf1ab, primers and ABY-labeled probes for detecting S protein, and primers and VIC-labeled probes for detecting N protein coding sequences for SARS-CoV-2, as well as a JUN-labeled internal positive control directed to either endogenous RNase P or an exogenous MS2 RNA template. The assay kit also included a synthetic DNA construct COVID-19 Control (1×104 copies/μL) encoding the target sequences for Orf1ab, S protein, and N protein.

[0122] The total nucleic acid content was isolated from samples collected via nasopharyngeal swab, nasopharyngeal aspirate, or bronchoalveolar lavage using the MagMAX Viral/Pathogen Nucleic Acid Isolation Kit (Thermo Fisher Scientific, Catalog No. A42356) in accordance with the instructions provided therewith.

[0123] For each assay, the components in Table 12 were combined for the number of reactions, plus 10% overage:

TABLE 12
RT-qPCR Reaction Mix

| Component | Volume/reaction | |
|---|---|---|
| Master Mix (4X) | 6.25 | Ml |
| COVID-19 Real Time PCR | 1.25 | μL |
| Assay Multiplex | | |
| Nuclease-free water | 12.50 | μL |
| Total Reaction Mix Volume | 20.00 | μL |

[0124] The “Master Mix” referenced in Table 12 was a TaqPath™ 1-Step Multiplex Master Mix (No ROX™) (Thermo Fisher Scientific, Catalog Nos. A28521, A28522, A28523).

[0125] The COVID-19 Control was diluted to a working stock of 25 copies/μL. The reaction mixes were vortexed for about 10-30 seconds) and centrifuged briefly. For each reaction, the components in Table 13, below, were combined in a MicroAmp™ Optical 96-Well Reaction Plate (0.2 mL/well) (Thermo Fisher Scientific, Catalog No. N8010560):

TABLE 13
RT-qPCR Reactions

| Component | Volume/reaction | |
|---|---|---|
| Reaction Mix (see Table 12) | 20.0 | μL |
| Nucleic acid sample (from RNA extraction) or | 5.00 | μL |
| 2 μL COVID-19 Control + 3 μL PCR-grade | | |
| water or | | |
| Purified Negative Control (from RNA | | |
| extraction) | | |
| Total Reaction Volume | 25.00 | μL |

[0126] The plate was sealed with a MicroAmp Optical Adhesive Film (Thermo Fisher Scientific, Catalog No. 4306311) and vortexed briefly to mix the contents. The plate was centrifuged briefly to collect the contents at the bottom of the wells. The plate was loaded into a QuantStudio 5 Real-Time PCR System (Thermo Fisher Scientific, Catalog No. A28139) and the protocol in Table 14 was run.

TABLE 14
RT-qPCR Protocol for Multiplex Assay

| Step | Stage | # of cycles | Temp. | | Time | |
|---|---|---|---|---|---|---|
| UNG incubation | 1 | 1 | 25° | C. | 2 | min |
| Reverse transcription^{†} | 2 | 1 | 53° | C.^{†} | 10 | min |
| Polymerase activation^{‡} | 3 | 1 | 95° | C. | 2 | min |
| Amplification | 4 | 40 | 95° | C. | 3 | sec |
| | | | 60° | C. | 30 | sec |

^{†}Preferably any temperature between 48° C.-55° C.
^{‡}RT inactivation, initial denaturation, and activation of DNAP.

[0127] The resulting data were analyzed using the QuantStudio Design and Analysis Software v1.5.1 included with the QuantStudio 5 Real-Time PCR System. For each plate, the control reactions were confirmed to perform as expected (i.e., the no template control had an undetermined Cₜ value and the positive control had a Cₜ value less than or equal to 30).

[0128] The Cₜ value for each individual assay was also analyzed in accordance with Table 15.

TABLE 15
Multiplex Assay Results Guide

| | | | Ct = 40 or |
|---|---|---|---|
| | Ct < 37 | 37 ≤ Ct < 40 | undetermined |
| Orflab (FAM) | Positive | Repeat test | Negative |
| N protein (VIC) | Positive | Repeat test | Negative |
| S protein (ABY) | Positive | Repeat test | Negative |
| Pos. Control (JUN) | Positive | Positive | Negative |

[0129] The results for each tested sample was interpreted to have SARS-CoV-2 RNA present if either (i) any two of Orf1ab, S protein, or N protein were positive or (ii) any one of Orf1ab, S protein, or N protein were positive in two different samples collected from the same subject. SARS-CoV-2 RNA was not present in the sample if all three of Orf1ab, S protein, and N protein were negative.

### Example 3: Detection of SARS-CoV-2 Mutant Variants

[0130] An exemplary protocol for discriminating reference SARS-CoV-2 from mutant variant SARS-CoV-2 was performed using the TaqMan™ SARS-CoV-2 Mutation Panel (Thermo Fisher Scientific, Catalog Nos. 4332077, 4332075). Each exemplary mutation assay included primers, VIC-labelled probes for detecting reference SARS-CoV-2, FAM-labelled probes for detecting a targeted mutation of a mutant variant, and optionally an internal control such as an in vitro transcribed (IVT) RNA control.

[0131] Each assay utilized the components of the reaction mix shown in Table 16. The illustrated volumes were for each well of a well plate with 0.2 ml wells and can be halved where 0.1 ml wells are used.

TABLE 16
RT-qPCR Reaction Mix

| Component | Volume | |
|---|---|---|
| RT-qPCR Master Mix, CG (4X) | 5 | μL |
| Mutation Assay (40x) | 0.5 | μL |
| RNA Sample (or nuclease-free water for | 5.0 | μL |
| control) | | |
| Nuclease-free water | 9.5 | μL |
| Total Reaction Mix Volume | 20 | μL |

[0132] The “RT-qPCR Master Mix, CG” referenced in Table 16 is available from Thermo Fisher Scientific, Catalog Nos. A15299 and A15300. Reaction mixes were vortexed for about 10-30 seconds and centrifuged briefly. The plate was loaded into a QuantStudio Real-Time PCR System utilizing QuantStudio Design and Analysis Software v2.5, and the protocol shown in Table 17 was run.

TABLE 17
RT-qPCR Protocol

| Step | Temp. | Time | | No. of cycles |
|---|---|---|---|---|
| Pre-read | 60° C. | 30 | sec | 1 |
| Reverse transcription | 50° C. | 10 | min | 1 |
| DNA Polymerase | 95° C. | 2 | min | 1 |
| activation | | | | |
| Denaturation | 95° C. | 3 | sec | 45 |
| Anneal/extend | 60° C. | 30 | sec | |
| Post-read | 60° C. | 30 | sec | 1 |

[0133] Data was generated using IVT-RNA controls for reference and mutant alleles at four different input concentrations: 100,000 copies, 10,000 copies, 1,000 copies, and 250 copies per 20 μL reaction.

[0134] Resulting allelic discrimination plots are shown in FIGS. 3A-3E. The Figures illustrate that assays targeting del69V70, N501Y, P681H, K417N, and E484K mutations are able to effectively discriminate between these mutations and the co-mixed sequences with reference alleles.

### Example 4: Multiplex Assay Panels

[0135] A panel of assays was designed to differentiate between a first strain of SARS-CoV-2 and a second, different strain of SARS-CoV-2. The panel included assays for two or more SNP markers selected to enable differentiation between different SARS-CoV-2 variants.

[0136] Marker Selection—Data analysis for identifying SARS-CoV-2 markers was performed using the Variant Analysis for Diagnostic Monitoring (DxM) system (ROSALIND). Genome sequences and metadata used for the selection of markers in this study were obtained through a Direct Connectivity Agreement for complete daily worldwide downloads from the GISAID EpiCov database. Sequences not tagged with the “is_complete’ and sequences with “n_content” of more than 0.05 were excluded. Pairwise whole-genome alignments of all sequences were performed using LASTZ v1.04.02 with NCBI Reference Sequence: NC_045512.2 as the SARS-CoV-2 reference genome. The Bioconductor package for genetic variants, VariantAnnotation v1.20.2, was then used for the translation into amino acids in R v3.3.2, and the identification of amino acid substitutions or frameshifts were used to call a unique mutation incident.

[0137] Selection of the lineages considered for the marker panel was performed by combining the top 100 most frequent lineages reported worldwide for the 120-day period between May 12, 2021 and Sep. 11, 2021 (data not shown). 1,200,791 sequences representing 393 lineages were analyzed. The top 10 most unique mutations for each World Health Organization (WHO) label were then identified, and multiple combinations of these unique mutations were evaluated to classify a viral sequence into a WHO label with at least 90% overall accuracy. Additional mutations were added to ensure coverage for the Centers for Disease Control and Prevention (CDC) Variants Being Monitored (VBM), Variants of Interest (VOI), Variants of Concern (VOC), and Variants of High Consequence (VOHC) classifications.

[0138] The positive percent agreement (PPA) and negative percent agreement (NPA) for each marker set compared to NGS was calculated according to the Clinical and Laboratory Standards Institute (CLSI) EP12-A2: User Protocol for Evaluation of Qualitative Test Performance. A classifier algorithm was developed to measure the presence, absence, and combination of mutations to accurately assign the WHO label classification. A dedicated system was established to host the classifier algorithm and provide a web application with Application Programmer Interface (API) capabilities for standardized data submission and processing. This system was established on a secure virtual private cloud instance on the Google Cloud Platform (GCP) with the ability to process thousands of specimens per minute.

[0139] Samples—SARS-CoV-2 positive subject samples used in this investigation were collected in November 2021 and December 2021 by Helix OpCo and The University of Washington (UW), Clinical Laboratory Improvement Amendments (CLIA)-certified labs participating in the CDC National SARS-CoV-2 Strain Surveillance (NS3) sequencing program to monitor variant distribution in the United States. The Helix OpCo samples were de-identified remnants of clinical testing that were banked and used pursuant to an Institutional Research Board (IRB)-approved research registry and biobanking protocol. Use of the UW de-identified excess clinical specimens was approved with a consent waiver by the UW RB.

[0140] Genotyping Assay—Primers were selected based on mapping to genome regions with a mutation frequency of less than one percent (1%), ensuring no major polymorphisms interfere with the primers. Primer sets were designed such that amplicon sizes were below 150 base pairs (bp). Minor groove binder (MGB) probes were designed to achieve optimal discrimination between the two (2) alleles by taking the position, nucleotide composition, melting temperature (Tm), and the type of allele into consideration. The Tm of the primers ranged from 59-62° C. and the Tm of the probes ranged from 59-65° C. Viral RNA was extracted using the MagMAX Viral/Pathogen II Nucleic Acid Isolation Kit (Thermo Fisher Scientific). Real-time reverse transcription PCR using the selected panel was performed using the TaqPath™ 1-Step RT-qPCR Master Mix, CG (Thermo Fisher Scientific) on a QuantStudio™ 7 Real-Time PCR System or ProFlex™ 2×384-well PCR System (Thermo Fisher Scientific) followed by endpoint data collection using the QuantStudio™ 7 Real-Time PCR System. Data were analyzed using the TaqMan™ Genotyper v1.6 software (Thermo Fisher Scientific). Normalized reported emission of (Rn) VIC (x-axis) versus Rn FAM (y-axis) from amplification of the reference and mutant alleles was used by the software algorithm to obtain genotype calls. The specific assays for each of the markers are available commercially.

[0141] Marker Panel—An assay panel can be designed using two or more of the markers shown in Table 18. The set of assays shown in Table 18 included 45 lineage specific markers and 3 generic (variant-agnostic) markers.

TABLE 18
Example 48-, 24-, 16-, 12-, and 8-marker panels

| | | Marker Set | | | | | |
|---|---|---|---|---|---|---|---|
| Nucleotide Mutation | AA Mutation | 48 | 24 | 16 | 12 | 8 | Classification Outcome |
| nsp 10 gene (position | None | + | + | + | + | + | SARS-CoV-2 detected |
| 13025-13441) | | | | | | | |
| A23403G | S:D614G | + | + | + | + | | |
| N gene SC2 (position | None | + | | | | | |
| 29461-29482) | | | | | | | |
| T16176C | None | + | + | + | + | + | Alpha |
| A21801C | S:DB0A | + | + | + | + | + | Beta |
| A22812C | S:K417T | + | + | + | + | + | Gamma |
| C21618G | S:T19R | + | + | + | + | + | Delta |
| C22995A | S:T478K | + | + | + | + | + | Delta |
| T7424G | orf1ab:F2387V | + | + | + | + | + | Lambda |
| A13057T | None | + | + | + | + | + | Mu |
| G22018T | S:W152C | + | + | + | + | | Epsilon |
| A16500C | orf1b:Q1011H | + | + | + | + | | Iota |
| T22917A | S:L452Q | + | + | + | + | | Lambda |
| A11456G | orf1ab:I3731V | + | + | + | | | Delta |
| A28699G | None | + | + | + | | | Eta |
| G23593C | S:Q677H | + | + | + | | | Eta |
| A24775T | S:Q1071H | + | + | + | | | Kappa |
| TACATG21765---- | S:HV69-- | + | + | | | | Alpha |
| TTA21991- | S:Y144- | + | + | | | | Alpha (when combined |
| | | | | | | | with T16176C) |
| CTTTACTTG22281------ | S:LLA241-- | + | + | | | | Beta (when combined |
| | | | | | | | with A21801C) |
| T733C | None | + | + | | | | Gamma |
| T22917G | S:L452R | + | + | | | | Delta (or Epsilon when |
| | | | | | | | combined with G22018T) |
| A22320G | S:D253G | + | + | | | | Iota (when combined with |
| | | | | | | | A16500C) |
| G23012C | S:E484Q | + | + | | | | Kappa (when combined |
| | | | | | | | with A24775T) |
| C27925A | ORF8:T11K | + | + | | | | Mu |
| G22132T | S:R190S | + | | | | | Gamma |
| C23604G | S:P681R | + | | | | | Delta |
| C25469T | ORF3a:S26L | + | | | | | Delta |
| G5629T | None | + | | | | | Centers for Disease |
| C21614T | S:L18F | + | | | | | Control and Prevention |
| T21615G | S:L18R | + | | | | | (CDC) Variant Being |
| C21638T | S:P26S | + | | | | | Monitored (VBM), |
| G21770T | S:V70F | + | | | | | Variant of Interest (VOI), |
| A21801G | S:DB0G | + | | | | | Variant of Concern |
| G22335T | S:W258L | + | | | | | (VOC), or Variant of |
| G22813T | S:K417N | + | | | | | High Consequence |
| T22882G | S:N440K | + | | | | | (VOHC) |
| C22995G | S:T478R | + | | | | | |
| G23012A | S:E484K | + | | | | | |
| A23063T | S:N501Y | + | | | | | |
| A23064C | S:N501T | + | | | | | |
| A23592C | S:Q677P | + | | | | | |
| G23593T | S:Q677H | + | | | | | |
| C23604A | S:P681H | + | | | | | |
| C23664T | S:A701V | + | | | | | |
| G24410A | S:D950N | + | | | | | |
| T27206C | ORF6:F2S | + | | | | | |
| T28226C | None | + | | | | | |

[0142] Variant-Agnostic Positivity Markers—The variant-agnostic markers include 1) the S Gene: D614G (S:A23403G) mutation-a nonsynonymous mutation resulting in the replacement of aspartic acid with glycine at position 614 of the viral spike protein; 2) a conserved sequence in nsp10 (nucleotides 13025-13441); and 3) a conserved sequence identified by the CDC in the N Gene SC2 region (nucleotides 29461-29482).

[0143] A total of 1,128 retrospective samples (1,031 SARS-CoV-2 positive and 97 SARS-CoV-2 negative) were evaluated using the variant agnostic positivity markers (Table 19). The combined markers were detected in all but seven (7) of the 1,031 SARS-CoV-2 positive samples. The positive percent agreement (PPA) using any combination of two (2) or more markers is greater than or equal to 98.9% with the criteria being that one (1) marker detected is enough to make a positive call. Additionally, the PPA using one (1) marker is greater than or equal to 96%. There were no false positive results (data not shown).

TABLE 19
Variant agnostic positivity markers in vitro performance

| | Variant-Agnostic Marker | | | | |
|---|---|---|---|---|---|
| No. of | | | N gene | Positive | |
| Markers | S: D614G | nsp10 gene | SC2 | Calls | PPA (%) |
| 3 | + | + | + | 1024 | 99.3 |
| 2 | + | + | | 1020 | 98.9 |
| | + | | + | 1021 | 99 |
| | | + | + | 1023 | 99.2 |
| 1 | + | | | 993 | 96.3 |
| | | + | | 1018 | 98.7 |
| | | | + | 990 | 96 |
| 0 | | | | 7 | 0.7 |

| | |
|---|---|
| Total SARS-COV-2 positive samples: | 1031 |

[0144] Lineage Assignment—The performance of the genotyping assay panel and the associated classifier was determined by in silico and in vitro studies with retrospectively collected SARS-CoV-2 specimens. A bioinformatics simulation was performed using GISAID SARS-CoV-2 sequence data from the first week of each month beginning November 2020 through October 2021. 323,148 GISAID sequences were analyzed. With the 48-marker set, simulated PPA ranged from 80.7% to 99.9% and simulated NPA ranged from 98.1% to 100% for the top 10 WHO lineages. The performance for the Kappa variant was impacted by reporting from Asia and Oceania where many Kappa positive samples were misclassified as Delta.

TABLE 20
48-marker set in silico classifier performance

| | Simulated PPA (%) | Simulated NPA (%) |
|---|---|---|
| Alpha | 99.9 | 98.8 |
| Beta | 97.7 | 100 |
| Gamma | 99 | 100 |
| Delta | 99.8 | 98.1 |
| Epsilon | 96.1 | 100 |
| Eta | 96.2 | 100 |
| Iota | 98.4 | 100 |
| Kappa | 80.7 | 100 |
| Lambda | 98.1 | 100 |
| Mu | 98.8 | 100 |

[0145] The 1,031 SARS-CoV-2 positive samples were genotyped and classified with the 48 markers shown in Table 18. The classifications were then compared to the Phylogenetic Assignment of Named Global Outbreak Lineages (Pango) lineage assignment based on the whole-genome sequences in the GISAID database (Table 21). The PPA ranged from 96.312 to 200 and the NPA ranged from 99.2% to 100% for the top 10 WHO lineages. The classifier categorized an additional 78 samples as undetermined (data not shown). Pango assigned 77 of these samples to 14 lineages for which the genotyping assay does not include specific markers (Zeta, B.1, B.1.1.507, B.1.2, B.1.221, B.1.241, B.1.517, B.1.596, B.1.609, B.1.625, B.1.628, B.1.634, B.1.637, and C.36.3), and did not classify one (1) of these samples.

TABLE 21
48-marker set in vitro classifier performance

| | | Classifier Call | | | |
|---|---|---|---|---|---|
| Pango Assignment | | Positive | Negative | PPA/PPN (%) | |
| Alpha | Positive | 122 | 1 | 99.2 | PPA |
| | Negative | 7 | 908 | 99.2 | PPN |
| Beta | Positive | 13 | 0 | 100 | PPA |
| | Negative | 0 | 1018 | 100 | PPN |
| Gamma | Positive | 109 | 0 | 100 | PPA |
| | Negative | 0 | 922 | 100 | PPN |
| Delta | Positive | 456 | 5 | 98.9 | PPA |
| | Negative | 1 | 570 | 99.8 | PPN |
| Epsilon | Positive | 78 | 3 | 96.3 | PPA |
| | Negative | 3 | 950 | 99.7 | PPN |
| Eta | Positive | 27 | 0 | 100 | PPA |
| | Negative | 0 | 1004 | 100 | PPN |
| Iota | Positive | 82 | 0 | 100 | PPA |
| | Negative | 1 | 949 | 99.9 | PPN |
| Kappa | Positive | 1 | 0 | 100 | PPA |
| | Negative | 0 | 1030 | 100 | PPN |
| Lambda | Positive | 2 | 0 | 100 | PPA |
| | Negative | 0 | 1029 | 100 | PPN |
| Mu | Positive | 54 | 0 | 100 | PPA |
| | Negative | 0 | 977 | 100 | PPN |

[0146] Marker Reduction—To optimize assay performance in terms of sample input, reductions of the 48-marker panel were explored. We assessed the performance of 24-, 16-, 12-, and 8-marker sets that were defined based on mutation combination performance and targeted lineage prevalence during the 120-day period between May 12, 2021 and Sep. 11, 2021 (Table 22). Each of the panels also included two (2) of the variant agnostic positivity markers (nsp10 gene and S:D614G), which were used as assay internal controls. The 48-, 24-, and 16-marker sets identified the top 10 most prevalent WHO lineages as of Sep. 11, 2021 (Alpha, Beta, Gamma, Delta, Epsilon, Eta, Iota, Kappa, Lambda, and Mu), while the 12- and eight (8)-marker sets identified eight (8) and six (6) of the top 10 WHO lineages, respectively.

TABLE 22
48-, 24-, 16-, 12-, and 8-marker sets in vitro classifier performance

| | Markers: | | | | | | | | | |
|---|---|---|---|---|---|---|---|---|---|---|
| | 48 | | 24 | | 16 | | 12 | | 8 | |
| | PPA | NPA | PPA | NPA | PPA | NPA | PPA | NPA | PPA | NPA |
| | (%) | (%) | (%) | (%) | (%) | (%) | (%) | (%) | (%) | (%) |
| Alpha | 99.2 | 99.2 | 99.2 | 99.2 | 98.4 | 99.1 | 98.4 | 99.1 | 98.4 | 99.1 |
| Beta | 100 | 100 | 100 | 100 | 100 | 100 | 100 | 100 | 100 | 100 |
| Gamma | 100 | 100 | 100 | 100 | 100 | 100 | 100 | 100 | 100 | 100 |
| Delta | 98.9 | 99.8 | 98.7 | 99.6 | 98.7 | 99.6 | 98.7 | 99.6 | 98.9 | 99.8 |
| Epsilon | 96.3 | 99.7 | 96.3 | 99.7 | 96.3 | 99.7 | 96.3 | 99.7 | * | 91.5 |
| Eta | 100 | 100 | 100 | 100 | 100 | 100 | * | 97.3 | * | 97.3 |
| Iota | 100 | 99.9 | 100 | 99.9 | 100 | 99.9 | 100 | 99.9 | * | 91.3 |
| Kappa | 100 | 100 | 100 | 100 | 100 | 100 | * | 99.9 | * | 99.9 |
| Lambda | 100 | 100 | 100 | 100 | 100 | 100 | 100 | 100 | 100 | 100 |
| Mu | 100 | 100 | 100 | 100 | 100 | 100 | 100 | 100 | 100 | 100 |

*Could not call

[0147] Increase in Undetermined Calls as an Indicator of New Variant—An increase in the number of undetermined calls by the classifier provides a signal for focused sequencing of those samples, potentially allowing early detection of new variants. To test this hypothesis, a bioinformatics simulation was performed using a modification of the 12-marker panel. The two Delta-specific markers were removed to simulate what would have been observed before and during the emergence of the Delta variant. The 10-marker set was able to assign lineages to all positive samples in GISAID for North America in November 2020 and December 2020 (data not shown). The number of undetermined calls was 5, 7, and 1 respectively in January 2021, February 2021, and March 2021. In April 2021, the number increased to 51 followed by a rapid increase over the following three months to 12,825 undetermined calls in July 2021. We then compared these results to the average daily Delta prevalence in the United States from March 2021 to July 2021 as reported by the CDC. The prevalence data for the emerging Delta variant mirrors the rate of increase in undetermined calls over the same period.

### Example 5: Distinguishing Between Delta and Omicron Variants

[0148] Sequence analysis of the first 132 Omicron sequences revealed three (3) markers-ORFlab:A2710T, ORFlab:T13195C, and S:T547K-found in high percentages of these sequences. Based on in silico modeling, there was greater than 99% concurrence between the Pango assignment based on the GISAID sequence and the combined three markers (data not shown). Subsequently, we developed a genotyping assay consisting of the three Omicron-specific markers and one Delta-specific marker (S:T19R).

[0149] A total of 1,631 SARS-CoV-2 positive samples were collected and genotyped (Table 23). Sequencing confirmed that these samples consisted of 615 Omicron, 992 Delta, and three B.1 variants, as well as 21 samples that were not classified by Pango. The four-marker panel for Omicron genotyping correctly identified all 615 Omicron samples and 902 of the 992 Delta samples. The 90 Delta samples that were not detected were identified as Delta subtypes by Pango. The four-marker panel classified the three B.1 samples as undetermined, and the 21 samples not classified by Pango as 10 Omicron and 11 Delta.

TABLE 23
Four-marker set in vitro classifier performance

| | | Classifier Call | | | |
|---|---|---|---|---|---|
| Pango Assignment | | Positive | Negative | PPA/NPA (%) | |
| Omicron | Positive | 615 | 0 | 100 | PPA |
| | Negative | 10 | 1016 | 99 | NPA |
| Delta | Positive | 902 | 90 | 90.9 | PPA |
| | Negative | 11 | 639 | 98.3 | NPA |

[0150] As one example of such a four-marker set, a panel of assays may include: (1) assay no. 1188, (2) assay no. 1196, (3) assay no. 62 (or alternatively assay no. 61), and (4) assay no. 71 (or alternatively assay no. 72), as those assays are illustrated in FIGS. 2C and 2D. In some embodiments, the reference strain probes are optional in each of such assays that make up the panel.

[0151] We next deployed the four-marker panel in two CLIA-certified labs and genotyped 5,372 SARS-CoV-2 positive samples collected mainly in the States of Washington, California, and New York in December 2021. Using the four-marker panel, we determined that the relative prevalence of the Omicron variant grew from approximately 15% on Dec. 9, 2021 to approximately 80% on Dec. 21, 2021, while Delta decreased from 80% to 20% over the same period.

### EXAMPLE EMBODIMENTS

[0152] Provided below is a non-exhaustive list of numbered items reciting certain preferred embodiments:
[0153] 1. A composition for detecting the presence of SARS-CoV-2 in a biological sample, comprising a nucleic acid primer and/or probe with a sequence having at least 75%, at least 80%, at least 85%, at least 90%, at least 95%, at least 97%, at least 98%, at least 99%, or 100% homology to: SEQ ID NO:1 to SEQ ID NO:1304; SEQ ID NO:2001 to SEQ ID NO:3304; SEQ ID NO:4001 to SEQ ID NO:5304; and/or SEQ ID NO:6001 to SEQ ID NO:7304.
[0154] 2. The composition of item 1, comprising:
   [0155] a forward primer having at least 75%, at least 80%, at least 85%, at least 90%, at least 95%, at least 97%, at least 98%, at least 99%, or 100% homology to a sequence selected from SEQ ID NO:1 to SEQ ID NO:1304; and
   [0156] a reverse primer having at least 75%, at least 80%, at least 85%, at least 90%, at least 95%, at least 97%, at least 98%, at least 99%, or 100% homology to a sequence selected from SEQ ID NO:2001 to SEQ ID NO:3304.
[0157] 3. The composition of item 2, wherein the composition further comprises one or both of:
   [0158] a probe configured for association with a reference SARS-CoV-2 allele, the probe having at least 75%, at least 80%, at least 85%, at least 90%, at least 95%, at least 97%, at least 98%, at least 99%, or 100% homology to SEQ ID NO:4001 to SEQ ID NO:5304;
   [0159] a probe configured for association with a mutant SARS-CoV-2 allele, the probe having at least 75%, at least 80%, at least 85%, at least 90%, at least 95%, at least 97%, at least 98%, at least 99%, or 100% homology to SEQ ID NO:6001 to SEQ ID NO:7304.
[0160] 4. The composition of item 3, comprising:
   [0161] a sequence having at least 75%, at least 80%, at least 85%, at least 90%, at least 95%, at least 97%, at least 98%, at least 99%, or 100% homology to SEQ ID NO:X as a forward primer;
   [0162] a sequence having at least 75%, at least 80%, at least 85%, at least 90%, at least 95%, at least 97%, at least 98%, at least 99%, or 100% homology to SEQ ID NO:(X+2000) as a reverse primer;
   [0163] optionally, a sequence having at least 75%, at least 80%, at least 85%, at least 90%, at least 95%, at least 97%, at least 98%, at least 99%, or 100% homology to SEQ ID NO:(X+4000) as a probe configured for detecting a reference SARS-CoV-2 allele; and
   [0164] a sequence having at least 75%, at least 80%, at least 85%, at least 90%, at least 95%, at least 97%, at least 98%, at least 99%, or 100% homology to SEQ ID NO:(X+6000) as a probe configured for detecting a mutant SARS-CoV-2 allele, wherein X is from 1 to 1304.
[0165] 5. The composition of item 3 or item 4, comprising:
   [0166] SEQ ID NO:X as a forward primer;
   [0167] SEQ ID NO:(X+2000) as a reverse primer;
   [0168] optionally SEQ ID NO:(X+4000) as a probe configured for detecting a reference SARS-CoV-2 allele; and
   [0169] SEQ ID NO:(X+6000) as a probe configured for detecting a mutant SARS-CoV-2 allele,
   [0170] wherein X is from 1 to 1304.
[0171] 6. The composition of any one of items 3-5, wherein a first probe is selected from SEQ ID NO:4001 to SEQ ID NO:5304 and a second probe is selected from SEQ ID NO:6001 to SEQ ID NO:7304.
[0172] 7. The composition of item 6, wherein the first probe and the second probe are differentially labeled.
[0173] 8. The composition of any one of items 3-7, formulated to target one or more of an Alpha, Delta, or Omicron variant of SARS-CoV-2.
[0174] 9. The composition of item 8, formulated to target the Alpha variant of SARS-CoV-2.
[0175] 10. The composition of item 9, comprising two or more of:
   [0176] an assay including one of SEQ ID NO:560 through SEQ ID NO:562 as a forward primer, one of SEQ ID NO:2560 through SEQ ID NO:2562 as a reverse primer, one of SEQ ID NO:4560 through SEQ ID NO:4562 as a probe configured to target a reference SARS-CoV-2 allele, and one of SEQ ID NO:6560 through SEQ ID NO:6562 as a probe configured to target a mutant SARS-CoV-2 allele;
   [0177] an assay including SEQ ID NO:564 as a forward primer, SEQ ID NO:2564 as a reverse primer, SEQ ID NO:4564 as a probe configured to target a reference SARS-CoV-2 allele, and SEQ ID NO:6564 as a probe configured to target a mutant SARS-CoV-2 allele;
   [0178] an assay including one of SEQ ID NO:803 through SEQ ID NO:809 as a forward primer, one of SEQ ID NO:2803 through SEQ ID NO:2809 as a reverse primer, one of SEQ ID NO:4803 through SEQ ID NO:4809 as a probe configured to target a reference SARS-CoV-2 allele, and one of SEQ ID NO:6803 through SEQ ID NO:6809 as a probe configured to target a mutant SARS-CoV-2 allele;
   [0179] an assay including one of SEQ ID NO:820 through SEQ ID NO:967 as a forward primer, one of SEQ ID NO:2820 through SEQ ID NO:2967 as a reverse primer, one of SEQ ID NO:4820 through SEQ ID NO:4967 as a probe configured to target a reference SARS-CoV-2 allele, and one of SEQ ID NO:6820 through SEQ ID NO:6967 as a probe configured to target a mutant SARS-CoV-2 allele;
   [0180] an assay including SEQ ID NO:28 as a forward primer, SEQ ID NO:2028 as a reverse primer, SEQ ID NO:4028 as a probe configured to target a reference SARS-CoV-2 allele, and SEQ ID NO:6028 as a probe configured to target a mutant SARS-CoV-2 allele;
   [0181] an assay including one of SEQ ID NO:336 through SEQ ID NO:380 as a forward primer, one of SEQ ID NO:2336 through SEQ ID NO:2380 as a reverse primer, one of SEQ ID NO:4336 through SEQ ID NO:4380 as a probe configured to target a reference SARS-CoV-2 allele, and one of SEQ ID NO:6336 through SEQ ID NO:6380 as a probe configured to target a mutant SARS-CoV-2 allele;
   [0182] an assay including one of SEQ ID NO:93 through SEQ ID NO:323 as a forward primer, one of SEQ ID NO:2093 through SEQ ID NO:2323 as a reverse primer, one of SEQ ID NO:4093 through SEQ ID NO:4323 as a probe configured to target a reference SARS-CoV-2 allele, and one of SEQ ID NO:6093 through SEQ ID NO:6323 as a probe configured to target a mutant SARS-CoV-2 allele;
   [0183] an assay including one of SEQ ID NO:1063 through SEQ ID NO:1186 as a forward primer, one of SEQ ID NO:3063 through SEQ ID NO:3186 as a reverse primer, one of SEQ ID NO:5063 through SEQ ID NO:5186 as a probe configured to target a reference SARS-CoV-2 allele, and one of SEQ ID NO:7063 through SEQ ID NO:7186 as a probe configured to target a mutant SARS-CoV-2 allele;
   [0184] an assay including one of SEQ ID NO:1197 through SEQ ID NO:1267 as a forward primer, one of SEQ ID NO:3197 through SEQ ID NO:3267 as a reverse primer, one of SEQ ID NO:5197 through SEQ ID NO:5267 as a probe configured to target a reference SARS-CoV-2 allele, and one of SEQ ID NO:7197 through SEQ ID NO:7267 as a probe configured to target a mutant SARS-CoV-2 allele. 11. The composition of item 9, comprising two or more of:
   [0185] an assay including one of SEQ ID NO:560 through SEQ ID NO:562 as a forward primer, one of SEQ ID NO:2560 through SEQ ID NO:2562 as a reverse primer, one of SEQ ID NO:4560 through SEQ ID NO:4562 as a probe configured to target a reference SARS-CoV-2 allele, and one of SEQ ID NO:6560 through SEQ ID NO:6562 as a probe configured to target a mutant SARS-CoV-2 allele;
   [0186] an assay including SEQ ID NO:564 as a forward primer, SEQ ID NO:2564 as a reverse primer, SEQ ID NO:4564 as a probe configured to target a reference SARS-CoV-2 allele, and SEQ ID NO:6564 as a probe configured to target a mutant SARS-CoV-2 allele;
   [0187] an assay including one of SEQ ID NO:803 through SEQ ID NO:809 as a forward primer, one of SEQ ID NO:2803 through SEQ ID NO:2809 as a reverse primer, one of SEQ ID NO:4803 through SEQ ID NO:4809 as a probe configured to target a reference SARS-CoV-2 allele, and one of SEQ ID NO:6803 through SEQ ID NO:6809 as a probe configured to target a mutant SARS-CoV-2 allele;
   [0188] an assay including one of SEQ ID NO:820 through SEQ ID NO:824 as a forward primer, one of SEQ ID NO:2820 through SEQ ID NO:2824 as a reverse primer, one of SEQ ID NO:4820 through SEQ ID NO:4824 as a probe configured to target a reference SARS-CoV-2 allele, and one of SEQ ID NO:6820 through SEQ ID NO:6824 as a probe configured to target a mutant SARS-CoV-2 allele;
   [0189] an assay including SEQ ID NO:28 as a forward primer, SEQ ID NO:2028 as a reverse primer, SEQ ID NO:4028 as a probe configured to target a reference SARS-CoV-2 allele, and SEQ ID NO:6028 as a probe configured to target a mutant SARS-CoV-2 allele;
   [0190] an assay including one of SEQ ID NO:336 through SEQ ID NO:339 as a forward primer, one of SEQ ID NO:2336 through SEQ ID NO:2339 as a reverse primer, one of SEQ ID NO:4336 through SEQ ID NO:4339 as a probe configured to target a reference SARS-CoV-2 allele, and one of SEQ ID NO:6336 through SEQ ID NO:6339 as a probe configured to target a mutant SARS-CoV-2 allele;
   [0191] an assay including one of SEQ ID NO:93 through SEQ ID NO:102 as a forward primer, one of SEQ ID NO:2093 through SEQ ID NO:2102 as a reverse primer, one of SEQ ID NO:4093 through SEQ ID NO:4102 as a probe configured to target a reference SARS-CoV-2 allele, and one of SEQ ID NO:6093 through SEQ ID NO:6102 as a probe configured to target a mutant SARS-CoV-2 allele;
   [0192] an assay including SEQ ID NO:1063 as a forward primer, SEQ ID NO:3063 as a reverse primer, SEQ ID NO:5063 as a probe configured to target a reference SARS-CoV-2 allele, and SEQ ID NO:7063 as a probe configured to target a mutant SARS-CoV-2 allele;
   [0193] an assay including one of SEQ ID NO:1197 through SEQ ID NO:1203 as a forward primer, one of SEQ ID NO:3197 through SEQ ID NO:3203 as a reverse primer, one of SEQ ID NO:5197 through SEQ ID NO:5203 as a probe configured to target a reference SARS-CoV-2 allele, and one of SEQ ID NO:7197 through SEQ ID NO:7203 as a probe configured to target a mutant SARS-CoV-2 allele. 12. The composition of item 8, formulated to target the Delta variant of SARS-CoV-2.
[0194] 13. The composition of item 12, comprising two or more of:
   [0195] an assay including SEQ ID NO:784 as a forward primer, SEQ ID NO:2784 as a reverse primer, SEQ ID NO:4784 as a probe configured to target a reference SARS-CoV-2 allele, and SEQ ID NO:6784 as a probe configured to target a mutant SARS-CoV-2 allele;
   [0196] an assay including SEQ ID NO:968 as a forward primer, SEQ ID NO:2968 as a reverse primer, SEQ ID NO:4968 as a probe configured to target a reference SARS-CoV-2 allele, and SEQ ID NO:6968 as a probe configured to target a mutant SARS-CoV-2 allele;
   [0197] an assay including one of SEQ ID NO:607 through SEQ ID NO:608 as a forward primer, one of SEQ ID NO:2607 through SEQ ID NO:2608 as a reverse primer, one of SEQ ID NO:4607 through SEQ ID NO:4608 as a probe configured to target a reference SARS-CoV-2 allele, and one of SEQ ID NO:6607 through SEQ ID NO:6608 as a probe configured to target a mutant SARS-CoV-2 allele;
   [0198] an assay including one of SEQ ID NO:1188 through SEQ ID NO:1189 as a forward primer, one of SEQ ID NO:3188 through SEQ ID NO:3189 as a reverse primer, one of SEQ ID NO:5188 through SEQ ID NO:5189 as a probe configured to target a reference SARS-CoV-2 allele, and one of SEQ ID NO:7188 through SEQ ID NO:7189 as a probe configured to target a mutant SARS-CoV-2 allele;
   [0199] an assay including one of SEQ ID NO:1192 through SEQ ID NO:1193 as a forward primer, one of SEQ ID NO:3192 through SEQ ID NO:3193 as a reverse primer, one of SEQ ID NO:5192 through SEQ ID NO:5193 as a probe configured to target a reference SARS-CoV-2 allele, and one of SEQ ID NO:7192 through SEQ ID NO:7193 as a probe configured to target a mutant SARS-CoV-2 allele.
[0200] 14. The composition of item 8, formulated to target the Omicron variant of SARS-CoV-2.
[0201] 15. The composition of item 14, comprising two or more of:
   [0202] an assay including one of SEQ ID NO:61 through SEQ ID NO:62 as a forward primer, one of SEQ ID NO:2061 through SEQ ID NO:2062 as a reverse primer, one of SEQ ID NO:4061 through SEQ ID NO:4062 as a probe configured to target a reference SARS-CoV-2 allele, and one of SEQ ID NO:6061 through SEQ ID NO:6062 as a probe configured to target a mutant SARS-CoV-2 allele;
   [0203] an assay including SEQ ID NO:616 as a forward primer, SEQ ID NO:2616 as a reverse primer, SEQ ID NO:4616 as a probe configured to target a reference SARS-CoV-2 allele, and SEQ ID NO:6616 as a probe configured to target a mutant SARS-CoV-2 allele;
   [0204] an assay including one of SEQ ID NO:972 through SEQ ID NO:975 as a forward primer, one of SEQ ID NO:2972 through SEQ ID NO:2975 as a reverse primer, one of SEQ ID NO:4972 through SEQ ID NO:4975 as a probe configured to target a reference SARS-CoV-2 allele, and one of SEQ ID NO:6972 through SEQ ID NO:6975 as a probe configured to target a mutant SARS-CoV-2 allele;
   [0205] an assay including one of SEQ ID NO:71 through SEQ ID NO:72 as a forward primer, one of SEQ ID NO:2071 through SEQ ID NO:2072 as a reverse primer, one of SEQ ID NO:4071 through SEQ ID NO:4072 as a probe configured to target a reference SARS-CoV-2 allele, and one of SEQ ID NO:6071 through SEQ ID NO:6072 as a probe configured to target a mutant SARS-CoV-2 allele;
   [0206] an assay including SEQ ID NO:1196 as a forward primer, SEQ ID NO:3196 as a reverse primer, SEQ ID NO:5196 as a probe configured to target a reference SARS-CoV-2 allele, and SEQ ID NO:7196 as a probe configured to target a mutant SARS-CoV-2 allele.
[0207] 16. The composition of item 8, formulated to target and/or distinguish between the Alpha and Delta variants of SARS-CoV-2.
[0208] 17. The composition of item 16, comprising at least one assay formulated for targeting the Alpha variant selected from:
   [0209] an assay including one of SEQ ID NO:560 through SEQ ID NO:562 as a forward primer, one of SEQ ID NO:2560 through SEQ ID NO:2562 as a reverse primer, one of SEQ ID NO:4560 through SEQ ID NO:4562 as a probe configured to target a reference SARS-CoV-2 allele, and one of SEQ ID NO:6560 through SEQ ID NO:6562 as a probe configured to target a mutant SARS-CoV-2 allele;
   [0210] an assay including SEQ ID NO:564 as a forward primer, SEQ ID NO:2564 as a reverse primer, SEQ ID NO:4564 as a probe configured to target a reference SARS-CoV-2 allele, and SEQ ID NO:6564 as a probe configured to target a mutant SARS-CoV-2 allele;
   [0211] an assay including one of SEQ ID NO:803 through SEQ ID NO:809 as a forward primer, one of SEQ ID NO:2803 through SEQ ID NO:2809 as a reverse primer, one of SEQ ID NO:4803 through SEQ ID NO:4809 as a probe configured to target a reference SARS-CoV-2 allele, and one of SEQ ID NO:6803 through SEQ ID NO:6809 as a probe configured to target a mutant SARS-CoV-2 allele;
   [0212] an assay including one of SEQ ID NO:820 through SEQ ID NO:967 as a forward primer, one of SEQ ID NO:2820 through SEQ ID NO:2967 as a reverse primer, one of SEQ ID NO:4820 through SEQ ID NO:4967 as a probe configured to target a reference SARS-CoV-2 allele, and one of SEQ ID NO:6820 through SEQ ID NO:6967 as a probe configured to target a mutant SARS-CoV-2 allele;
   [0213] an assay including SEQ ID NO:28 as a forward primer, SEQ ID NO:2028 as a reverse primer, SEQ ID NO:4028 as a probe configured to target a reference SARS-CoV-2 allele, and SEQ ID NO:6028 as a probe configured to target a mutant SARS-CoV-2 allele;
   [0214] an assay including one of SEQ ID NO:336 through SEQ ID NO:380 as a forward primer, one of SEQ ID NO:2336 through SEQ ID NO:2380 as a reverse primer, one of SEQ ID NO:4336 through SEQ ID NO:4380 as a probe configured to target a reference SARS-CoV-2 allele, and one of SEQ ID NO:6336 through SEQ ID NO:6380 as a probe configured to target a mutant SARS-CoV-2 allele;
   [0215] an assay including one of SEQ ID NO:93 through SEQ ID NO:323 as a forward primer, one of SEQ ID NO:2093 through SEQ ID NO:2323 as a reverse primer, one of SEQ ID NO:4093 through SEQ ID NO:4323 as a probe configured to target a reference SARS-CoV-2 allele, and one of SEQ ID NO:6093 through SEQ ID NO:6323 as a probe configured to target a mutant SARS-CoV-2 allele;
   [0216] an assay including one of SEQ ID NO:1063 through SEQ ID NO:1186 as a forward primer, one of SEQ ID NO:3063 through SEQ ID NO:3186 as a reverse primer, one of SEQ ID NO:5063 through SEQ ID NO:5186 as a probe configured to target a reference SARS-CoV-2 allele, and one of SEQ ID NO:7063 through SEQ ID NO:7186 as a probe configured to target a mutant SARS-CoV-2 allele;
   [0217] an assay including one of SEQ ID NO:1197 through SEQ ID NO:1267 as a forward primer, one of SEQ ID NO:3197 through SEQ ID NO:3267 as a reverse primer, one of SEQ ID NO:5197 through SEQ ID NO:5267 as a probe configured to target a reference SARS-CoV-2 allele, and one of SEQ ID NO:7197 through SEQ ID NO:7267 as a probe configured to target a mutant SARS-CoV-2 allele; and at least one assay formulated for targeting the Delta variant selected from:
   [0218] an assay including SEQ ID NO:784 as a forward primer, SEQ ID NO:2784 as a reverse primer, SEQ ID NO:4784 as a probe configured to target a reference SARS-CoV-2 allele, and SEQ ID NO:6784 as a probe configured to target a mutant SARS-CoV-2 allele;
   [0219] an assay including SEQ ID NO:968 as a forward primer, SEQ ID NO:2968 as a reverse primer, SEQ ID NO:4968 as a probe configured to target a reference SARS-CoV-2 allele, and SEQ ID NO:6968 as a probe configured to target a mutant SARS-CoV-2 allele;
   [0220] an assay including one of SEQ ID NO:607 through SEQ ID NO:608 as a forward primer, one of SEQ ID NO:2607 through SEQ ID NO:2608 as a reverse primer, one of SEQ ID NO:4607 through SEQ ID NO:4608 as a probe configured to target a reference SARS-CoV-2 allele, and one of SEQ ID NO:6607 through SEQ ID NO:6608 as a probe configured to target a mutant SARS-CoV-2 allele;
   [0221] an assay including one of SEQ ID NO:1188 through SEQ ID NO:1189 as a forward primer, one of SEQ ID NO:3188 through SEQ ID NO:3189 as a reverse primer, one of SEQ ID NO:5188 through SEQ ID NO:5189 as a probe configured to target a reference SARS-CoV-2 allele, and one of SEQ ID NO:7188 through SEQ ID NO:7189 as a probe configured to target a mutant SARS-CoV-2 allele;
   [0222] an assay including one of SEQ ID NO:1192 through SEQ ID NO:1193 as a forward primer, one of SEQ ID NO:3192 through SEQ ID NO:3193 as a reverse primer, one of SEQ ID NO:5192 through SEQ ID NO:5193 as a probe configured to target a reference SARS-CoV-2 allele, and one of SEQ ID NO:7192 through SEQ ID NO:7193 as a probe configured to target a mutant SARS-CoV-2 allele.
[0223] 18. The composition of item 8, formulated to target and/or distinguish between the Alpha and Omicron variants of SARS-CoV-2.
[0224] 19. The composition of item 18, comprising at least one assay formulated for targeting the Alpha variant selected from:
   [0225] an assay including one of SEQ ID NO:560 through SEQ ID NO:562 as a forward primer, one of SEQ ID NO:2560 through SEQ ID NO:2562 as a reverse primer, one of SEQ ID NO:4560 through SEQ ID NO:4562 as a probe configured to target a reference SARS-CoV-2 allele, and one of SEQ ID NO:6560 through SEQ ID NO:6562 as a probe configured to target a mutant SARS-CoV-2 allele;
   [0226] an assay including SEQ ID NO:564 as a forward primer, SEQ ID NO:2564 as a reverse primer, SEQ ID NO:4564 as a probe configured to target a reference SARS-CoV-2 allele, and SEQ ID NO:6564 as a probe configured to target a mutant SARS-CoV-2 allele;
   [0227] an assay including one of SEQ ID NO:803 through SEQ ID NO:809 as a forward primer, one of SEQ ID NO:2803 through SEQ ID NO:2809 as a reverse primer, one of SEQ ID NO:4803 through SEQ ID NO:4809 as a probe configured to target a reference SARS-CoV-2 allele, and one of SEQ ID NO:6803 through SEQ ID NO:6809 as a probe configured to target a mutant SARS-CoV-2 allele;
   [0228] an assay including one of SEQ ID NO:820 through SEQ ID NO:967 as a forward primer, one of SEQ ID NO:2820 through SEQ ID NO:2967 as a reverse primer, one of SEQ ID NO:4820 through SEQ ID NO:4967 as a probe configured to target a reference SARS-CoV-2 allele, and one of SEQ ID NO:6820 through SEQ ID NO:6967 as a probe configured to target a mutant SARS-CoV-2 allele;
   [0229] an assay including SEQ ID NO:28 as a forward primer, SEQ ID NO:2028 as a reverse primer, SEQ ID NO:4028 as a probe configured to target a reference SARS-CoV-2 allele, and SEQ ID NO:6028 as a probe configured to target a mutant SARS-CoV-2 allele;
   [0230] an assay including one of SEQ ID NO:336 through SEQ ID NO:380 as a forward primer, one of SEQ ID NO:2336 through SEQ ID NO:2380 as a reverse primer, one of SEQ ID NO:4336 through SEQ ID NO:4380 as a probe configured to target a reference SARS-CoV-2 allele, and one of SEQ ID NO:6336 through SEQ ID NO:6380 as a probe configured to target a mutant SARS-CoV-2 allele;
   [0231] an assay including one of SEQ ID NO:93 through SEQ ID NO:323 as a forward primer, one of SEQ ID NO:2093 through SEQ ID NO:2323 as a reverse primer, one of SEQ ID NO:4093 through SEQ ID NO:4323 as a probe configured to target a reference SARS-CoV-2 allele, and one of SEQ ID NO:6093 through SEQ ID NO:6323 as a probe configured to target a mutant SARS-CoV-2 allele;
   [0232] an assay including one of SEQ ID NO:1063 through SEQ ID NO:1186 as a forward primer, one of SEQ ID NO:3063 through SEQ ID NO:3186 as a reverse primer, one of SEQ ID NO:5063 through SEQ ID NO:5186 as a probe configured to target a reference SARS-CoV-2 allele, and one of SEQ ID NO:7063 through SEQ ID NO:7186 as a probe configured to target a mutant SARS-CoV-2 allele;
   [0233] an assay including one of SEQ ID NO:1197 through SEQ ID NO:1267 as a forward primer, one of SEQ ID NO:3197 through SEQ ID NO:3267 as a reverse primer, one of SEQ ID NO:5197 through SEQ ID NO:5267 as a probe configured to target a reference SARS-CoV-2 allele, and one of SEQ ID NO:7197 through SEQ ID NO:7267 as a probe configured to target a mutant SARS-CoV-2 allele; and at least one assay formulated for targeting the Omicron variant selected from:
   [0234] an assay including one of SEQ ID NO:61 through SEQ ID NO:62 as a forward primer, one of SEQ ID NO:2061 through SEQ ID NO:2062 as a reverse primer, one of SEQ ID NO:4061 through SEQ ID NO:4062 as a probe configured to target a reference SARS-CoV-2 allele, and one of SEQ ID NO:6061 through SEQ ID NO:6062 as a probe configured to target a mutant SARS-CoV-2 allele;
   [0235] an assay including SEQ ID NO:616 as a forward primer, SEQ ID NO:2616 as a reverse primer, SEQ ID NO:4616 as a probe configured to target a reference SARS-CoV-2 allele, and SEQ ID NO:6616 as a probe configured to target a mutant SARS-CoV-2 allele;
   [0236] an assay including one of SEQ ID NO:972 through SEQ ID NO:975 as a forward primer, one of SEQ ID NO:2972 through SEQ ID NO:2975 as a reverse primer, one of SEQ ID NO:4972 through SEQ ID NO:4975 as a probe configured to target a reference SARS-CoV-2 allele, and one of SEQ ID NO:6972 through SEQ ID NO:6975 as a probe configured to target a mutant SARS-CoV-2 allele;
   [0237] an assay including one of SEQ ID NO:71 through SEQ ID NO:72 as a forward primer, one of SEQ ID NO:2071 through SEQ ID NO:2072 as a reverse primer, one of SEQ ID NO:4071 through SEQ ID NO:4072 as a probe configured to target a reference SARS-CoV-2 allele, and one of SEQ ID NO:6071 through SEQ ID NO:6072 as a probe configured to target a mutant SARS-CoV-2 allele;
   [0238] an assay including SEQ ID NO:1196 as a forward primer, SEQ ID NO:3196 as a reverse primer, SEQ ID NO:5196 as a probe configured to target a reference SARS-CoV-2 allele, and SEQ ID NO:7196 as a probe configured to target a mutant SARS-CoV-2 allele.
[0239] 20. The composition of item 8, formulated to target and/or distinguish between the Delta and Omicron variants of SARS-CoV-2.
[0240] 21. The composition of item 20, comprising at least one assay formulated for targeting the Delta variant selected from:
   [0241] an assay including SEQ ID NO:784 as a forward primer, SEQ ID NO:2784 as a reverse primer, SEQ ID NO:4784 as a probe configured to target a reference SARS-CoV-2 allele, and SEQ ID NO:6784 as a probe configured to target a mutant SARS-CoV-2 allele;
   [0242] an assay including SEQ ID NO:968 as a forward primer, SEQ ID NO:2968 as a reverse primer, SEQ ID NO:4968 as a probe configured to target a reference SARS-CoV-2 allele, and SEQ ID NO:6968 as a probe configured to target a mutant SARS-CoV-2 allele;
   [0243] an assay including one of SEQ ID NO:607 through SEQ ID NO:608 as a forward primer, one of SEQ ID NO:2607 through SEQ ID NO:2608 as a reverse primer, one of SEQ ID NO:4607 through SEQ ID NO:4608 as a probe configured to target a reference SARS-CoV-2 allele, and one of SEQ ID NO:6607 through SEQ ID NO:6608 as a probe configured to target a mutant SARS-CoV-2 allele;
   [0244] an assay including one of SEQ ID NO:1188 through SEQ ID NO:1189 as a forward primer, one of SEQ ID NO:3188 through SEQ ID NO:3189 as a reverse primer, one of SEQ ID NO:5188 through SEQ ID NO:5189 as a probe configured to target a reference SARS-CoV-2 allele, and one of SEQ ID NO:7188 through SEQ ID NO:7189 as a probe configured to target a mutant SARS-CoV-2 allele;
   [0245] an assay including one of SEQ ID NO:1192 through SEQ ID NO:1193 as a forward primer, one of SEQ ID NO:3192 through SEQ ID NO:3193 as a reverse primer, one of SEQ ID NO:5192 through SEQ ID NO:5193 as a probe configured to target a reference SARS-CoV-2 allele, and one of SEQ ID NO:7192 through SEQ ID NO:7193 as a probe configured to target a mutant SARS-CoV-2 allele; and at least one assay formulated for targeting the Omicron variant selected from:
   [0246] an assay including one of SEQ ID NO:61 through SEQ ID NO:62 as a forward primer, one of SEQ ID NO:2061 through SEQ ID NO:2062 as a reverse primer, one of SEQ ID NO:4061 through SEQ ID NO:4062 as a probe configured to target a reference SARS-CoV-2 allele, and one of SEQ ID NO:6061 through SEQ ID NO:6062 as a probe configured to target a mutant SARS-CoV-2 allele;
   [0247] an assay including SEQ ID NO:616 as a forward primer, SEQ ID NO:2616 as a reverse primer, SEQ ID NO:4616 as a probe configured to target a reference SARS-CoV-2 allele, and SEQ ID NO:6616 as a probe configured to target a mutant SARS-CoV-2 allele;
   [0248] an assay including one of SEQ ID NO:972 through SEQ ID NO:975 as a forward primer, one of SEQ ID NO:2972 through SEQ ID NO:2975 as a reverse primer, one of SEQ ID NO:4972 through SEQ ID NO:4975 as a probe configured to target a reference SARS-CoV-2 allele, and one of SEQ ID NO:6972 through SEQ ID NO:6975 as a probe configured to target a mutant SARS-CoV-2 allele;
   [0249] an assay including one of SEQ ID NO:71 through SEQ ID NO:72 as a forward primer, one of SEQ ID NO:2071 through SEQ ID NO:2072 as a reverse primer, one of SEQ ID NO:4071 through SEQ ID NO:4072 as a probe configured to target a reference SARS-CoV-2 allele, and one of SEQ ID NO:6071 through SEQ ID NO:6072 as a probe configured to target a mutant SARS-CoV-2 allele;
   [0250] an assay including SEQ ID NO:1196 as a forward primer, SEQ ID NO:3196 as a reverse primer, SEQ ID NO:5196 as a probe configured to target a reference SARS-CoV-2 allele, and SEQ ID NO:7196 as a probe configured to target a mutant SARS-CoV-2 allele.
[0251] 22. The composition of item 8, formulated to target and/or distinguish between the Alpha, Delta, and Omicron variants of SARS-CoV-2.
[0252] 23. The composition of item 22, comprising at least one assay formulated for targeting the Alpha variant selected from:
   [0253] an assay including one of SEQ ID NO:560 through SEQ ID NO:562 as a forward primer, one of SEQ ID NO:2560 through SEQ ID NO:2562 as a reverse primer, one of SEQ ID NO:4560 through SEQ ID NO:4562 as a probe configured to target a reference SARS-CoV-2 allele, and one of SEQ ID NO:6560 through SEQ ID NO:6562 as a probe configured to target a mutant SARS-CoV-2 allele;
   [0254] an assay including SEQ ID NO:564 as a forward primer, SEQ ID NO:2564 as a reverse primer, SEQ ID NO:4564 as a probe configured to target a reference SARS-CoV-2 allele, and SEQ ID NO:6564 as a probe configured to target a mutant SARS-CoV-2 allele;
   [0255] an assay including one of SEQ ID NO:803 through SEQ ID NO:809 as a forward primer, one of SEQ ID NO:2803 through SEQ ID NO:2809 as a reverse primer, one of SEQ ID NO:4803 through SEQ ID NO:4809 as a probe configured to target a reference SARS-CoV-2 allele, and one of SEQ ID NO:6803 through SEQ ID NO:6809 as a probe configured to target a mutant SARS-CoV-2 allele;
   [0256] an assay including one of SEQ ID NO:820 through SEQ ID NO:967 as a forward primer, one of SEQ ID NO:2820 through SEQ ID NO:2967 as a reverse primer, one of SEQ ID NO:4820 through SEQ ID NO:4967 as a probe configured to target a reference SARS-CoV-2 allele, and one of SEQ ID NO:6820 through SEQ ID NO:6967 as a probe configured to target a mutant SARS-CoV-2 allele;
   [0257] an assay including SEQ ID NO:28 as a forward primer, SEQ ID NO:2028 as a reverse primer, SEQ ID NO:4028 as a probe configured to target a reference SARS-CoV-2 allele, and SEQ ID NO:6028 as a probe configured to target a mutant SARS-CoV-2 allele;
   [0258] an assay including one of SEQ ID NO:336 through SEQ ID NO:380 as a forward primer, one of SEQ ID NO:2336 through SEQ ID NO:2380 as a reverse primer, one of SEQ ID NO:4336 through SEQ ID NO:4380 as a probe configured to target a reference SARS-CoV-2 allele, and one of SEQ ID NO:6336 through SEQ ID NO:6380 as a probe configured to target a mutant SARS-CoV-2 allele;
   [0259] an assay including one of SEQ ID NO:93 through SEQ ID NO:323 as a forward primer, one of SEQ ID NO:2093 through SEQ ID NO:2323 as a reverse primer, one of SEQ ID NO:4093 through SEQ ID NO:4323 as a probe configured to target a reference SARS-CoV-2 allele, and one of SEQ ID NO:6093 through SEQ ID NO:6323 as a probe configured to target a mutant SARS-CoV-2 allele;
   [0260] an assay including one of SEQ ID NO:1063 through SEQ ID NO:1186 as a forward primer, one of SEQ ID NO:3063 through SEQ ID NO:3186 as a reverse primer, one of SEQ ID NO:5063 through SEQ ID NO:5186 as a probe configured to target a reference SARS-CoV-2 allele, and one of SEQ ID NO:7063 through SEQ ID NO:7186 as a probe configured to target a mutant SARS-CoV-2 allele;
   [0261] an assay including one of SEQ ID NO:1197 through SEQ ID NO:1267 as a forward primer, one of SEQ ID NO:3197 through SEQ ID NO:3267 as a reverse primer, one of SEQ ID NO:5197 through SEQ ID NO:5267 as a probe configured to target a reference SARS-CoV-2 allele, and one of SEQ ID NO:7197 through SEQ ID NO:7267 as a probe configured to target a mutant SARS-CoV-2 allele;
   [0262] at least one assay formulated for targeting the Delta variant selected from: an assay including SEQ ID NO:784 as a forward primer, SEQ ID NO:2784 as a reverse primer, SEQ ID NO:4784 as a probe configured to target a reference SARS-CoV-2 allele, and SEQ ID NO:6784 as a probe configured to target a mutant SARS-CoV-2 allele;
   [0263] an assay including SEQ ID NO:968 as a forward primer, SEQ ID NO:2968 as a reverse primer, SEQ ID NO:4968 as a probe configured to target a reference SARS-CoV-2 allele, and SEQ ID NO:6968 as a probe configured to target a mutant SARS-CoV-2 allele;
   [0264] an assay including one of SEQ ID NO:607 through SEQ ID NO:608 as a forward primer, one of SEQ ID NO:2607 through SEQ ID NO:2608 as a reverse primer, one of SEQ ID NO:4607 through SEQ ID NO:4608 as a probe configured to target a reference SARS-CoV-2 allele, and one of SEQ ID NO:6607 through SEQ ID NO:6608 as a probe configured to target a mutant SARS-CoV-2 allele;
   [0265] an assay including one of SEQ ID NO:1188 through SEQ ID NO:1189 as a forward primer, one of SEQ ID NO:3188 through SEQ ID NO:3189 as a reverse primer, one of SEQ ID NO:5188 through SEQ ID NO:5189 as a probe configured to target a reference SARS-CoV-2 allele, and one of SEQ ID NO:7188 through SEQ ID NO:7189 as a probe configured to target a mutant SARS-CoV-2 allele;
   [0266] an assay including one of SEQ ID NO:1192 through SEQ ID NO:1193 as a forward primer, one of SEQ ID NO:3192 through SEQ ID NO:3193 as a reverse primer, one of SEQ ID NO:5192 through SEQ ID NO:5193 as a probe configured to target a reference SARS-CoV-2 allele, and one of SEQ ID NO:7192 through SEQ ID NO:7193 as a probe configured to target a mutant SARS-CoV-2 allele; and at least one assay formulated for targeting the Omicron variant selected from:
   [0267] an assay including one of SEQ ID NO:61 through SEQ ID NO:62 as a forward primer, one of SEQ ID NO:2061 through SEQ ID NO:2062 as a reverse primer, one of SEQ ID NO:4061 through SEQ ID NO:4062 as a probe configured to target a reference SARS-CoV-2 allele, and one of SEQ ID NO:6061 through SEQ ID NO:6062 as a probe configured to target a mutant SARS-CoV-2 allele;
   [0268] an assay including SEQ ID NO:616 as a forward primer, SEQ ID NO:2616 as a reverse primer, SEQ ID NO:4616 as a probe configured to target a reference SARS-CoV-2 allele, and SEQ ID NO:6616 as a probe configured to target a mutant SARS-CoV-2 allele;
   [0269] an assay including one of SEQ ID NO:972 through SEQ ID NO:975 as a forward primer, one of SEQ ID NO:2972 through SEQ ID NO:2975 as a reverse primer, one of SEQ ID NO:4972 through SEQ ID NO:4975 as a probe configured to target a reference SARS-CoV-2 allele, and one of SEQ ID NO:6972 through SEQ ID NO:6975 as a probe configured to target a mutant SARS-CoV-2 allele;
   [0270] an assay including one of SEQ ID NO:71 through SEQ ID NO:72 as a forward primer, one of SEQ ID NO:2071 through SEQ ID NO:2072 as a reverse primer, one of SEQ ID NO:4071 through SEQ ID NO:4072 as a probe configured to target a reference SARS-CoV-2 allele, and one of SEQ ID NO:6071 through SEQ ID NO:6072 as a probe configured to target a mutant SARS-CoV-2 allele;
   [0271] an assay including SEQ ID NO:1196 as a forward primer, SEQ ID NO:3196 as a reverse primer, SEQ ID NO:5196 as a probe configured to target a reference SARS-CoV-2 allele, and SEQ ID NO:7196 as a probe configured to target a mutant SARS-CoV-2 allele.
[0272] 24. The composition of item 23, comprising:
   [0273] an assay including one of SEQ ID NO:61 through SEQ ID NO:62 as a forward primer, one of SEQ ID NO:2061 through SEQ ID NO:2062 as a reverse primer, one of SEQ ID NO:4061 through SEQ ID NO:4062 as a probe configured to target a reference SARS-CoV-2 allele, and one of SEQ ID NO:6061 through SEQ ID NO:6062 as a probe configured to target a mutant SARS-CoV-2 allele;
   [0274] an assay including one of SEQ ID NO:71 through SEQ ID NO:72 as a forward primer, one of SEQ ID NO:2071 through SEQ ID NO:2072 as a reverse primer, one of SEQ ID NO:4071 through SEQ ID NO:4072 as a probe configured to target a reference SARS-CoV-2 allele, and one of SEQ ID NO:6071 through SEQ ID NO:6072 as a probe configured to target a mutant SARS-CoV-2 allele;
   [0275] an assay including SEQ ID NO:1188 as a forward primer, SEQ ID NO:3188 as a reverse primer, SEQ ID NO:5188 as a probe configured to target a reference SARS-CoV-2 allele, and SEQ ID NO:7188 as a probe configured to target a mutant SARS-CoV-2 allele;
   [0276] an assay including SEQ ID NO:1196 as a forward primer, SEQ ID NO:3196 as a reverse primer, SEQ ID NO:5196 as a probe configured to target a reference SARS-CoV-2 allele, and SEQ ID NO:7196 as a probe configured to target a mutant SARS-CoV-2 allele.
[0277] 25. The composition of any one of items 1-24, further including one or more of a nucleic acid template, a polymerase, a buffer, and/or nucleotides.
[0278] 26. The composition of item 25, wherein the nucleic acid template is an RNA template.
[0279] 27. The composition of item 25, wherein the nucleic acid template is a DNA template.
[0280] 28. The composition of item 25, wherein the nucleic acid template is a cDNA template.
[0281] 29. The composition of item 25, wherein the nucleic acid template is a genomic DNA (gDNA) template.
[0282] 30. The composition of any one of items 1-29, wherein a first probe includes a fluorescent or other detectable label.
[0283] 31. The composition of item 30, wherein the label of the first probe is a fluorescent label.
[0284] 32. The composition of item 31, wherein the probe further includes a quencher that quenches the fluorescent label.
[0285] 33. The composition of any one of items 1-32, wherein at least one of the primers or probes of the composition are configured to hybridize with a target region within SEQ ID NO:7311, SEQ ID NO:7312, or SEQ ID NO:7313.
[0286] 34. The composition of any one of items 1-33 comprising a plurality of forward primers and a plurality of reverse primers to enable multiplex analysis of multiple target regions.
[0287] 35. The composition of item 34, wherein the multiple target regions are mutation sites that are together associated with a particular variant.
[0288] 36. The composition of item 35, comprising a plurality of different mutant allele probes each configured to associate with amplicons of a respective target region if the target region includes the mutation.
[0289] 37. The composition of item 36, comprising a plurality of different reference probes each configured to associate with amplicons of a respective target region if the target region does not include the mutation.
[0290] 38. The composition of any one of items 1-37, wherein the biological sample is a saliva sample, buccal sample, nasal sample, nasal pharyngeal sample, blood sample, urine sample, or semen sample.
[0291] 39. The composition of any one of items 1-38 wherein the biological sample is a human sample.
[0292] 40. The composition of any one of items 1-38, wherein the biological sample is a non-human sample.
[0293] 41. The composition of item 40, wherein the non-human sample is a mammalian sample.
[0294] 42. The composition of item 41, wherein the mammalian sample is from a mink, cat, dog, or livestock animal.
[0295] 43. A kit for detecting SARS-CoV-2 nucleic acid in a biological sample, comprising a composition of any one of items 1-42.
[0296] 44. The kit of item 43, further including a master mix.
[0297] 45. The kit of item 44, wherein the master mix is a TaqMan Fast Virus 1-Step Master Mix or a TaqPath 1-Step RT-qPCR Master Mix.
[0298] 46. The kit of any one of items 43-45, wherein at least one of the components is dried or freeze dried.
[0299] 47. The kit of any one of items 43-46, further including an array of PCR assays, each PCR assay situated in a different locus of the array.
[0300] 48. The kit of item 47, wherein the PCR assays are qPCR assays.
[0301] 49. A method for the detection of one or more SARS-CoV-2 coronaviruses in a biological sample comprising:
   [0302] (a) providing a reaction mixture containing the biological sample and a composition or kit as in any one of items 1-48; and
   [0303] (b) subjecting the reaction mixture to reaction conditions suitable to amplify a targeted SARS-CoV-2 nucleic acid.
[0304] 50. The method of item 49, further including generating one or more amplicons via PCR.
[0305] 51. The method of item 49 or 50, further including monitoring fluorescence produced during the PCR.
[0306] 52. The method of any one of items 49-51, further including determining the amount of nucleic acid present in the biological sample.
[0307] 53. The method of any one of items 49-52, wherein a positive control and/or a negative control are analyzed in conjunction with the sample.
[0308] 54. The method of item 53, where in the positive control is a synthetic plasmid comprising targets from the coronavirus Orf genes (e.g., Orf1a, Orf1b, Orf1ab, Orf8), the S protein gene, the N protein gene and/or RNase P.
[0309] 55. The method of any one of items 49-54, further comprising identifying the SARS-CoV-2 as a variant or as reference form.
[0310] 56. The method of any one of items 49-55, wherein the biological sample is a saliva sample, buccal sample, nasal sample, nasal pharyngeal sample, blood sample, urine sample, or semen sample.
[0311] 57. The method of any one of items 49-56, wherein the biological sample is a human sample.
[0312] 58. The method of any one of items 49-56, wherein the biological sample is a non-human sample.
[0313] 59. The method of item 58, wherein the non-human sample is a mammalian sample.
[0314] 60. The method of item 59, wherein the mammalian sample is from a mink, cat, dog, or livestock animal.
[0315] 61. A method of detecting SARS-CoV-2 viral nucleic acid present in a biological sample, comprising:
   [0316] (a) providing a composition or a kit as in any one of items 1-48;
   [0317] (b) forming a reaction volume by contacting the composition, in any order or combination, with a polymerase, nucleotides, and nucleic acid obtained from a biological sample; and
   [0318] (c) forming one or more amplification products containing amplified coronaviral sequences in the reaction volume, wherein the forming includes subjecting the reaction volume to amplification conditions suitable to amplify target coronaviral sequences from coronaviral nucleic acid, wherein the coronaviral nucleic acid are present in the sample prior to amplification.
[0319] 62. The method of item 61, further including detecting at least one of the amplification products during and/or after the forming step.
[0320] 63. The method of item 62, further including diagnosing a coronaviral infection in the organism.
[0321] 64. The method of any one of items 61-63, wherein the forming includes amplifying coronaviral target sequences from the coronaviral nucleic acid derived from the N gene, the S gene, the Orf genes (e.g., Orf1a, Orf1b, Orf1ab, Orf8), or combinations thereof.
[0322] 65. The method of any one of items 61-64, further comprising identifying the presence of a SARS-CoV-2 variant.
[0323] 66. The method of any one of items 61-65, further comprising determining whether detected SARS-CoV-2 nucleic acid is associated with a variant or a reference type.
[0324] 67. The method of item 66, wherein the variant is selected from Alpha, Delta, and Omicron.
[0325] 68. The method of any one of items 61-67, wherein the biological sample is a saliva sample, buccal sample, nasal sample, nasal pharyngeal sample, blood sample, urine sample, or semen sample.
[0326] 69. The method of any one of items 61-68, wherein the biological sample is a human sample.
[0327] 70. The method of any one of items 61-68, wherein the biological sample is a non-human sample.
[0328] 71. The method of item 70, wherein the non-human sample is a mammalian sample.
[0329] 72. The method of item 71, wherein the mammalian sample is from a mink, cat, dog, or livestock animal.

The application's sequence listing, which the Patent Office published only in electronic form, follows.

SEQUENCE LISTING (7313 sequences)

SEQ ID NO: 1 - DNA, 24 bp, Artificial Sequence
  Synthetic oligonucleotide
caagctggtaatgcaacagaagtg

SEQ ID NO: 2 - DNA, 31 bp, Artificial Sequence
  Synthetic oligonucleotide
tcaaacaaattgttgaatcctgtggtaattt

SEQ ID NO: 3 - DNA, 19 bp, Artificial Sequence
  Synthetic oligonucleotide
gcaactgagggagccttga

SEQ ID NO: 4 - DNA, 19 bp, Artificial Sequence
  Synthetic oligonucleotide
gcaactgagggagccttga

SEQ ID NO: 5 - DNA, 19 bp, Artificial Sequence
  Synthetic oligonucleotide
gcaactgagggagccttga

SEQ ID NO: 6 - DNA, 34 bp, Artificial Sequence
  Synthetic oligonucleotide
gctgcttatgtagacaattctagtcttactatta

SEQ ID NO: 7 - DNA, 28 bp, Artificial Sequence
  Synthetic oligonucleotide
catgacgttcgtgttgttttagatttca

SEQ ID NO: 8 - DNA, 23 bp, Artificial Sequence
  Synthetic oligonucleotide
aatctgctgctgaggcttctaag

SEQ ID NO: 9 - DNA, 26 bp, Artificial Sequence
  Synthetic oligonucleotide
ccttaagggtgtagaagctgttatgt

SEQ ID NO: 10 - DNA, 23 bp, Artificial Sequence
  Synthetic oligonucleotide
cccttaagggtgtagaagctgtt

SEQ ID NO: 11 - DNA, 26 bp, Artificial Sequence
  Synthetic oligonucleotide
ccttaagggtgtagaagctgttatgt

SEQ ID NO: 12 - DNA, 25 bp, Artificial Sequence
  Synthetic oligonucleotide
cgtagtcgcaacagttcaagaaatt

SEQ ID NO: 13 - DNA, 23 bp, Artificial Sequence
  Synthetic oligonucleotide
attcccaccaacagagcctaaaa

SEQ ID NO: 14 - DNA, 28 bp, Artificial Sequence
  Synthetic oligonucleotide
catgacgttcgtgttgttttagatttca

SEQ ID NO: 15 - DNA, 28 bp, Artificial Sequence
  Synthetic oligonucleotide
catgacgttcgtgttgttttagatttca

SEQ ID NO: 16 - DNA, 24 bp, Artificial Sequence
  Synthetic oligonucleotide
ccctcagattcaactggcagtaac

SEQ ID NO: 17 - DNA, 24 bp, Artificial Sequence
  Synthetic oligonucleotide
cctcagattcaactggcagtaacc

SEQ ID NO: 18 - DNA, 25 bp, Artificial Sequence
  Synthetic oligonucleotide
cgtagtcgcaacagttcaagaaatt

SEQ ID NO: 19 - DNA, 25 bp, Artificial Sequence
  Synthetic oligonucleotide
cgtagtcgcaacagttcaagaaatt

SEQ ID NO: 20 - DNA, 25 bp, Artificial Sequence
  Synthetic oligonucleotide
acgtagtcgcaacagttcaagaaat

SEQ ID NO: 21 - DNA, 25 bp, Artificial Sequence
  Synthetic oligonucleotide
acgtagtcgcaacagttcaagaaat

SEQ ID NO: 22 - DNA, 25 bp, Artificial Sequence
  Synthetic oligonucleotide
accaacagagcctaaaaaggacaaa

SEQ ID NO: 23 - DNA, 23 bp, Artificial Sequence
  Synthetic oligonucleotide
ctctcactcaacatggcaaggaa

SEQ ID NO: 24 - DNA, 27 bp, Artificial Sequence
  Synthetic oligonucleotide
ggatgatttctccaaacaattgcaaca

SEQ ID NO: 25 - DNA, 17 bp, Artificial Sequence
  Synthetic oligonucleotide
gcagaggcggcagtcaa

SEQ ID NO: 26 - DNA, 19 bp, Artificial Sequence
  Synthetic oligonucleotide
cggcagtcaagcctcttct

SEQ ID NO: 27 - DNA, 22 bp, Artificial Sequence
  Synthetic oligonucleotide
cctcatcacgtagtcgcaacag

SEQ ID NO: 28 - DNA, 25 bp, Artificial Sequence
  Synthetic oligonucleotide
ccacctgctctacaagatgcttatt

SEQ ID NO: 29 - DNA, 23 bp, Artificial Sequence
  Synthetic oligonucleotide
ccccgatttcagctatggttaga

SEQ ID NO: 30 - DNA, 25 bp, Artificial Sequence
  Synthetic oligonucleotide
gctaggagagtgtggacacttatga

SEQ ID NO: 31 - DNA, 25 bp, Artificial Sequence
  Synthetic oligonucleotide
gttcagataccttgtacgtgtggta

SEQ ID NO: 32 - DNA, 25 bp, Artificial Sequence
  Synthetic oligonucleotide
gttcagataccttgtacgtgtggta

SEQ ID NO: 33 - DNA, 32 bp, Artificial Sequence
  Synthetic oligonucleotide
actcaactttacttaggaggtatgagctatta

SEQ ID NO: 34 - DNA, 24 bp, Artificial Sequence
  Synthetic oligonucleotide
caagctggtaatgcaacagaagtg

SEQ ID NO: 35 - DNA, 24 bp, Artificial Sequence
  Synthetic oligonucleotide
caagctggtaatgcaacagaagtg

SEQ ID NO: 36 - DNA, 27 bp, Artificial Sequence
  Synthetic oligonucleotide
acctgctctacaagatgcttattacag

SEQ ID NO: 37 - DNA, 27 bp, Artificial Sequence
  Synthetic oligonucleotide
acctgctctacaagatgcttattacag

SEQ ID NO: 38 - DNA, 27 bp, Artificial Sequence
  Synthetic oligonucleotide
acctgctctacaagatgcttattacag

SEQ ID NO: 39 - DNA, 27 bp, Artificial Sequence
  Synthetic oligonucleotide
cacctgctctacaagatgcttattaca

SEQ ID NO: 40 - DNA, 27 bp, Artificial Sequence
  Synthetic oligonucleotide
cacctgctctacaagatgcttattaca

SEQ ID NO: 41 - DNA, 27 bp, Artificial Sequence
  Synthetic oligonucleotide
cacctgctctacaagatgcttattaca

SEQ ID NO: 42 - DNA, 23 bp, Artificial Sequence
  Synthetic oligonucleotide
ccacctgctctacaagatgctta

SEQ ID NO: 43 - DNA, 23 bp, Artificial Sequence
  Synthetic oligonucleotide
ccacctgctctacaagatgctta

SEQ ID NO: 44 - DNA, 23 bp, Artificial Sequence
  Synthetic oligonucleotide
ccacctgctctacaagatgctta

SEQ ID NO: 45 - DNA, 23 bp, Artificial Sequence
  Synthetic oligonucleotide
ccacctgctctacaagatgctta

SEQ ID NO: 46 - DNA, 24 bp, Artificial Sequence
  Synthetic oligonucleotide
ccacctgctctacaagatgcttat

SEQ ID NO: 47 - DNA, 24 bp, Artificial Sequence
  Synthetic oligonucleotide
ccacctgctctacaagatgcttat

SEQ ID NO: 48 - DNA, 24 bp, Artificial Sequence
  Synthetic oligonucleotide
ccacctgctctacaagatgcttat

SEQ ID NO: 49 - DNA, 24 bp, Artificial Sequence
  Synthetic oligonucleotide
ccacctgctctacaagatgcttat

SEQ ID NO: 50 - DNA, 26 bp, Artificial Sequence
  Synthetic oligonucleotide
ccacctgctctacaagatgcttatta

SEQ ID NO: 51 - DNA, 26 bp, Artificial Sequence
  Synthetic oligonucleotide
ccacctgctctacaagatgcttatta

SEQ ID NO: 52 - DNA, 27 bp, Artificial Sequence
  Synthetic oligonucleotide
ccacctgctctacaagatgcttattac

SEQ ID NO: 53 - DNA, 27 bp, Artificial Sequence
  Synthetic oligonucleotide
ccacctgctctacaagatgcttattac

SEQ ID NO: 54 - DNA, 25 bp, Artificial Sequence
  Synthetic oligonucleotide
ccacctgctctacaagatgcttatt

SEQ ID NO: 55 - DNA, 25 bp, Artificial Sequence
  Synthetic oligonucleotide
ccacctgctctacaagatgcttatt

SEQ ID NO: 56 - DNA, 26 bp, Artificial Sequence
  Synthetic oligonucleotide
ccacctgctctacaagatgcttatta

SEQ ID NO: 57 - DNA, 27 bp, Artificial Sequence
  Synthetic oligonucleotide
ccacctgctctacaagatgcttattac

SEQ ID NO: 58 - DNA, 25 bp, Artificial Sequence
  Synthetic oligonucleotide
ccacctgctctacaagatgcttatt

SEQ ID NO: 59 - DNA, 25 bp, Artificial Sequence
  Synthetic oligonucleotide
ccacctgctctacaagatgcttatt

SEQ ID NO: 60 - DNA, 23 bp, Artificial Sequence
  Synthetic oligonucleotide
ccccgatttcagctatggttaga

SEQ ID NO: 61 - DNA, 25 bp, Artificial Sequence
  Synthetic oligonucleotide
gtcatattaatgcgcaggtagcaaa

SEQ ID NO: 62 - DNA, 25 bp, Artificial Sequence
  Synthetic oligonucleotide
gtcatattaatgcgcaggtagcaaa

SEQ ID NO: 63 - DNA, 25 bp, Artificial Sequence
  Synthetic oligonucleotide
gctaggagagtgtggacacttatga

SEQ ID NO: 64 - DNA, 25 bp, Artificial Sequence
  Synthetic oligonucleotide
gctaggagagtgtggacacttatga

SEQ ID NO: 65 - DNA, 24 bp, Artificial Sequence
  Synthetic oligonucleotide
actactgaaatgctagcgaaagct

SEQ ID NO: 66 - DNA, 25 bp, Artificial Sequence
  Synthetic oligonucleotide
gttacactgtagaggaggcaaagac

SEQ ID NO: 67 - DNA, 19 bp, Artificial Sequence
  Synthetic oligonucleotide
ccatgcagggtgctgtaga

SEQ ID NO: 68 - DNA, 25 bp, Artificial Sequence
  Synthetic oligonucleotide
ctggtacggacacaactattacagt

SEQ ID NO: 69 - DNA, 23 bp, Artificial Sequence
  Synthetic oligonucleotide
gagcatagtcttgccgaatacca

SEQ ID NO: 70 - DNA, 25 bp, Artificial Sequence
  Synthetic oligonucleotide
ggtggcaaaccttgtatcaaagtag

SEQ ID NO: 71 - DNA, 24 bp, Artificial Sequence
  Synthetic oligonucleotide
tgttgtgtacacacactggtactg

SEQ ID NO: 72 - DNA, 24 bp, Artificial Sequence
  Synthetic oligonucleotide
tgttgtgtacacacactggtactg

SEQ ID NO: 73 - DNA, 27 bp, Artificial Sequence
  Synthetic oligonucleotide
ggcttatacccaacactcaatatctca

SEQ ID NO: 74 - DNA, 25 bp, Artificial Sequence
  Synthetic oligonucleotide
actgagtcctctttatgcatttgca

SEQ ID NO: 75 - DNA, 19 bp, Artificial Sequence
  Synthetic oligonucleotide
cagggaccacctggtactg

SEQ ID NO: 76 - DNA, 34 bp, Artificial Sequence
  Synthetic oligonucleotide
tttggtttatataaaaatacatgtgttggtagcg

SEQ ID NO: 77 - DNA, 25 bp, Artificial Sequence
  Synthetic oligonucleotide
actggacaaatgctggtgattacat

SEQ ID NO: 78 - DNA, 25 bp, Artificial Sequence
  Synthetic oligonucleotide
gtgctgacatcacatacagtaatgc

SEQ ID NO: 79 - DNA, 27 bp, Artificial Sequence
  Synthetic oligonucleotide
gaaaactataggtccagacatgttcct

SEQ ID NO: 80 - DNA, 31 bp, Artificial Sequence
  Synthetic oligonucleotide
attgtttgtagatttgacactagagtgctat

SEQ ID NO: 81 - DNA, 27 bp, Artificial Sequence
  Synthetic oligonucleotide
ttacgaccatgtcatatcaacatcaca

SEQ ID NO: 82 - DNA, 32 bp, Artificial Sequence; identical to SEQ ID NO: 33
  Synthetic oligonucleotide

SEQ ID NO: 83 - DNA, 32 bp, Artificial Sequence; identical to SEQ ID NO: 33
  Synthetic oligonucleotide

SEQ ID NO: 84 - DNA, 26 bp, Artificial Sequence
  Synthetic oligonucleotide
ggccatgtagaaacattttacccaaa

SEQ ID NO: 85 - DNA, 25 bp, Artificial Sequence
  Synthetic oligonucleotide
acactgtgagtgctttggtttatga

SEQ ID NO: 86 - DNA, 29 bp, Artificial Sequence
  Synthetic oligonucleotide
gccaatgttaatgcacttttatctactga

SEQ ID NO: 87 - DNA, 23 bp, Artificial Sequence
  Synthetic oligonucleotide
agcaaggtgaaatcaaggatgct

SEQ ID NO: 88 - DNA, 24 bp, Artificial Sequence
  Synthetic oligonucleotide
agcaaggtgaaatcaaggatgcta

SEQ ID NO: 89 - DNA, 26 bp, Artificial Sequence
  Synthetic oligonucleotide
cattccagtagcagtgacaatattgc

SEQ ID NO: 90 - DNA, 26 bp, Artificial Sequence
  Synthetic oligonucleotide
cattccagtagcagtgacaatattgc

SEQ ID NO: 91 - DNA, 25 bp, Artificial Sequence
  Synthetic oligonucleotide
tgctttgcttgtacagtaagtgaca

SEQ ID NO: 92 - DNA, 27 bp, Artificial Sequence
  Synthetic oligonucleotide
ttgttgcggcaatagtgtttataacac

SEQ ID NO: 93 - DNA, 24 bp, Artificial Sequence
  Synthetic oligonucleotide
actgtagctgcatttcaccaagaa

SEQ ID NO: 94 - DNA, 22 bp, Artificial Sequence
  Synthetic oligonucleotide
gtagctgcatttcaccaagaat

SEQ ID NO: 95 - DNA, 22 bp, Artificial Sequence
  Synthetic oligonucleotide
gtagctgcatttcaccaagaat

SEQ ID NO: 96 - DNA, 22 bp, Artificial Sequence
  Synthetic oligonucleotide
gtagctgcatttcaccaagaat

SEQ ID NO: 97 - DNA, 22 bp, Artificial Sequence
  Synthetic oligonucleotide
gtagctgcatttcaccaagaat

SEQ ID NO: 98 - DNA, 22 bp, Artificial Sequence
  Synthetic oligonucleotide
gtagctgcatttcaccaagaat

SEQ ID NO: 99 - DNA, 22 bp, Artificial Sequence
  Synthetic oligonucleotide
gtagctgcatttcaccaagaat

SEQ ID NO: 100 - DNA, 22 bp, Artificial Sequence
  Synthetic oligonucleotide
gtagctgcatttcaccaagaat

SEQ ID NO: 101 - DNA, 22 bp, Artificial Sequence
  Synthetic oligonucleotide
gtagctgcatttcaccaagaat

SEQ ID NO: 102 - DNA, 22 bp, Artificial Sequence
  Synthetic oligonucleotide
ctctgggaccaatggtactaag

SEQ ID NO: 103 - DNA, 23 bp, Artificial Sequence
  Synthetic oligonucleotide
acaactgtagctgcatttcacca

SEQ ID NO: 104 - DNA, 23 bp, Artificial Sequence
  Synthetic oligonucleotide
acaactgtagctgcatttcacca

SEQ ID NO: 105 - DNA, 23 bp, Artificial Sequence
  Synthetic oligonucleotide
acaactgtagctgcatttcacca

SEQ ID NO: 106 - DNA, 23 bp, Artificial Sequence
  Synthetic oligonucleotide
acaactgtagctgcatttcacca

SEQ ID NO: 107 - DNA, 23 bp, Artificial Sequence
  Synthetic oligonucleotide
acaactgtagctgcatttcacca

SEQ ID NO: 108 - DNA, 23 bp, Artificial Sequence
  Synthetic oligonucleotide
acaactgtagctgcatttcacca

SEQ ID NO: 109 - DNA, 23 bp, Artificial Sequence
  Synthetic oligonucleotide
acaactgtagctgcatttcacca

SEQ ID NO: 110 - DNA, 23 bp, Artificial Sequence
  Synthetic oligonucleotide
acaactgtagctgcatttcacca

SEQ ID NO: 111 - DNA, 23 bp, Artificial Sequence
  Synthetic oligonucleotide
acaactgtagctgcatttcacca

SEQ ID NO: 112 - DNA, 23 bp, Artificial Sequence
  Synthetic oligonucleotide
acaactgtagctgcatttcacca

SEQ ID NO: 113 - DNA, 23 bp, Artificial Sequence
  Synthetic oligonucleotide
acaactgtagctgcatttcacca

SEQ ID NO: 114 - DNA, 23 bp, Artificial Sequence
  Synthetic oligonucleotide
acaactgtagctgcatttcacca

SEQ ID NO: 115 - DNA, 23 bp, Artificial Sequence
  Synthetic oligonucleotide
acaactgtagctgcatttcacca

SEQ ID NO: 116 - DNA, 24 bp, Artificial Sequence
  Synthetic oligonucleotide
actgtagctgcatttcaccaagaa

SEQ ID NO: 117 - DNA, 24 bp, Artificial Sequence
  Synthetic oligonucleotide
actgtagctgcatttcaccaagaa

SEQ ID NO: 118 - DNA, 24 bp, Artificial Sequence
  Synthetic oligonucleotide
actgtagctgcatttcaccaagaa

SEQ ID NO: 119 - DNA, 23 bp, Artificial Sequence
  Synthetic oligonucleotide
actgtagctgcatttcaccaaga

SEQ ID NO: 120 - DNA, 24 bp, Artificial Sequence
  Synthetic oligonucleotide
actgtagctgcatttcaccaagaa

SEQ ID NO: 121 - DNA, 24 bp, Artificial Sequence
  Synthetic oligonucleotide
actgtagctgcatttcaccaagaa

SEQ ID NO: 122 - DNA, 24 bp, Artificial Sequence
  Synthetic oligonucleotide
actgtagctgcatttcaccaagaa

SEQ ID NO: 123 - DNA, 24 bp, Artificial Sequence
  Synthetic oligonucleotide
actgtagctgcatttcaccaagaa

SEQ ID NO: 124 - DNA, 24 bp, Artificial Sequence
  Synthetic oligonucleotide
actgtagctgcatttcaccaagaa

SEQ ID NO: 125 - DNA, 23 bp, Artificial Sequence
  Synthetic oligonucleotide
actgtagctgcatttcaccaaga

SEQ ID NO: 126 - DNA, 24 bp, Artificial Sequence
  Synthetic oligonucleotide
actgtagctgcatttcaccaagaa

SEQ ID NO: 127 - DNA, 23 bp, Artificial Sequence
  Synthetic oligonucleotide
actgtagctgcatttcaccaaga

SEQ ID NO: 128 - DNA, 24 bp, Artificial Sequence
  Synthetic oligonucleotide
actgtagctgcatttcaccaagaa

SEQ ID NO: 129 - DNA, 24 bp, Artificial Sequence
  Synthetic oligonucleotide
actgtagctgcatttcaccaagaa

SEQ ID NO: 130 - DNA, 24 bp, Artificial Sequence
  Synthetic oligonucleotide
actgtagctgcatttcaccaagaa

SEQ ID NO: 131 - DNA, 25 bp, Artificial Sequence
  Synthetic oligonucleotide
actgtagctgcatttcaccaagaat

SEQ ID NO: 132 - DNA, 25 bp, Artificial Sequence
  Synthetic oligonucleotide
actgtagctgcatttcaccaagaat

SEQ ID NO: 133 - DNA, 25 bp, Artificial Sequence
  Synthetic oligonucleotide
actgtagctgcatttcaccaagaat

SEQ ID NO: 134 - DNA, 25 bp, Artificial Sequence
  Synthetic oligonucleotide
actgtagctgcatttcaccaagaat

SEQ ID NO: 135 - DNA, 25 bp, Artificial Sequence
  Synthetic oligonucleotide
actgtagctgcatttcaccaagaat

SEQ ID NO: 136 - DNA, 24 bp, Artificial Sequence
  Synthetic oligonucleotide
actgtagctgcatttcaccaagaa

SEQ ID NO: 137 - DNA, 24 bp, Artificial Sequence
  Synthetic oligonucleotide
actgtagctgcatttcaccaagaa

SEQ ID NO: 138 - DNA, 25 bp, Artificial Sequence
  Synthetic oligonucleotide
actgtagctgcatttcaccaagaat

SEQ ID NO: 139 - DNA, 25 bp, Artificial Sequence
  Synthetic oligonucleotide
actgtagctgcatttcaccaagaat

SEQ ID NO: 140 - DNA, 25 bp, Artificial Sequence
  Synthetic oligonucleotide
actgtagctgcatttcaccaagaat

SEQ ID NO: 141 - DNA, 25 bp, Artificial Sequence
  Synthetic oligonucleotide
actgtagctgcatttcaccaagaat

SEQ ID NO: 142 - DNA, 25 bp, Artificial Sequence
  Synthetic oligonucleotide
actgtagctgcatttcaccaagaat

SEQ ID NO: 143 - DNA, 25 bp, Artificial Sequence
  Synthetic oligonucleotide
actgtagctgcatttcaccaagaat

SEQ ID NO: 144 - DNA, 25 bp, Artificial Sequence
  Synthetic oligonucleotide
actgtagctgcatttcaccaagaat

SEQ ID NO: 145 - DNA, 25 bp, Artificial Sequence
  Synthetic oligonucleotide
actgtagctgcatttcaccaagaat

SEQ ID NO: 146 - DNA, 25 bp, Artificial Sequence
  Synthetic oligonucleotide
actgtagctgcatttcaccaagaat

SEQ ID NO: 147 - DNA, 23 bp, Artificial Sequence
  Synthetic oligonucleotide
actgtagctgcatttcaccaaga

SEQ ID NO: 148 - DNA, 23 bp, Artificial Sequence
  Synthetic oligonucleotide
actgtagctgcatttcaccaaga

SEQ ID NO: 149 - DNA, 23 bp, Artificial Sequence
  Synthetic oligonucleotide
actgtagctgcatttcaccaaga

SEQ ID NO: 150 - DNA, 23 bp, Artificial Sequence
  Synthetic oligonucleotide
actgtagctgcatttcaccaaga

SEQ ID NO: 151 - DNA, 23 bp, Artificial Sequence
  Synthetic oligonucleotide
actgtagctgcatttcaccaaga

SEQ ID NO: 152 - DNA, 23 bp, Artificial Sequence
  Synthetic oligonucleotide
actgtagctgcatttcaccaaga

SEQ ID NO: 153 - DNA, 23 bp, Artificial Sequence
  Synthetic oligonucleotide
actgtagctgcatttcaccaaga

SEQ ID NO: 154 - DNA, 23 bp, Artificial Sequence
  Synthetic oligonucleotide
actgtagctgcatttcaccaaga

SEQ ID NO: 155 - DNA, 23 bp, Artificial Sequence
  Synthetic oligonucleotide
actgtagctgcatttcaccaaga

SEQ ID NO: 156 - DNA, 23 bp, Artificial Sequence
  Synthetic oligonucleotide
actgtagctgcatttcaccaaga

SEQ ID NO: 157 - DNA, 23 bp, Artificial Sequence
  Synthetic oligonucleotide
actgtagctgcatttcaccaaga

SEQ ID NO: 158 - DNA, 25 bp, Artificial Sequence
  Synthetic oligonucleotide
agctgcatttcaccaagaatgtagt

SEQ ID NO: 159 - DNA, 25 bp, Artificial Sequence
  Synthetic oligonucleotide
agctgcatttcaccaagaatgtagt

SEQ ID NO: 160 - DNA, 25 bp, Artificial Sequence
  Synthetic oligonucleotide
agctgcatttcaccaagaatgtagt

SEQ ID NO: 161 - DNA, 25 bp, Artificial Sequence
  Synthetic oligonucleotide
agctgcatttcaccaagaatgtagt

SEQ ID NO: 162 - DNA, 25 bp, Artificial Sequence
  Synthetic oligonucleotide
agctgcatttcaccaagaatgtagt

SEQ ID NO: 163 - DNA, 25 bp, Artificial Sequence
  Synthetic oligonucleotide
agctgcatttcaccaagaatgtagt

SEQ ID NO: 164 - DNA, 23 bp, Artificial Sequence
  Synthetic oligonucleotide
caactgtagctgcatttcaccaa

SEQ ID NO: 165 - DNA, 23 bp, Artificial Sequence
  Synthetic oligonucleotide
caactgtagctgcatttcaccaa

SEQ ID NO: 166 - DNA, 23 bp, Artificial Sequence
  Synthetic oligonucleotide
caactgtagctgcatttcaccaa

SEQ ID NO: 167 - DNA, 23 bp, Artificial Sequence
  Synthetic oligonucleotide
caactgtagctgcatttcaccaa

SEQ ID NO: 168 - DNA, 23 bp, Artificial Sequence
  Synthetic oligonucleotide
caactgtagctgcatttcaccaa

SEQ ID NO: 169 - DNA, 23 bp, Artificial Sequence
  Synthetic oligonucleotide
caactgtagctgcatttcaccaa

SEQ ID NO: 170 - DNA, 23 bp, Artificial Sequence
  Synthetic oligonucleotide
caactgtagctgcatttcaccaa

SEQ ID NO: 171 - DNA, 24 bp, Artificial Sequence
  Synthetic oligonucleotide
caactgtagctgcatttcaccaag

SEQ ID NO: 172 - DNA, 24 bp, Artificial Sequence
  Synthetic oligonucleotide
caactgtagctgcatttcaccaag

SEQ ID NO: 173 - DNA, 24 bp, Artificial Sequence
  Synthetic oligonucleotide
caactgtagctgcatttcaccaag

SEQ ID NO: 174 - DNA, 24 bp, Artificial Sequence
  Synthetic oligonucleotide
caactgtagctgcatttcaccaag

SEQ ID NO: 175 - DNA, 24 bp, Artificial Sequence
  Synthetic oligonucleotide
caactgtagctgcatttcaccaag

SEQ ID NO: 176 - DNA, 24 bp, Artificial Sequence
  Synthetic oligonucleotide
caactgtagctgcatttcaccaag

SEQ ID NO: 177 - DNA, 23 bp, Artificial Sequence
  Synthetic oligonucleotide
caactgtagctgcatttcaccaa

SEQ ID NO: 178 - DNA, 23 bp, Artificial Sequence
  Synthetic oligonucleotide
caactgtagctgcatttcaccaa

SEQ ID NO: 179 - DNA, 23 bp, Artificial Sequence
  Synthetic oligonucleotide
caactgtagctgcatttcaccaa

SEQ ID NO: 180 - DNA, 24 bp, Artificial Sequence
  Synthetic oligonucleotide
caactgtagctgcatttcaccaag

SEQ ID NO: 181 - DNA, 24 bp, Artificial Sequence
  Synthetic oligonucleotide
caactgtagctgcatttcaccaag

SEQ ID NO: 182 - DNA, 24 bp, Artificial Sequence
  Synthetic oligonucleotide
caactgtagctgcatttcaccaag

SEQ ID NO: 183 - DNA, 24 bp, Artificial Sequence
  Synthetic oligonucleotide
caactgtagctgcatttcaccaag

SEQ ID NO: 184 - DNA, 24 bp, Artificial Sequence
  Synthetic oligonucleotide
caactgtagctgcatttcaccaag

SEQ ID NO: 185 - DNA, 23 bp, Artificial Sequence
  Synthetic oligonucleotide
caactgtagctgcatttcaccaa

SEQ ID NO: 186 - DNA, 24 bp, Artificial Sequence
  Synthetic oligonucleotide
caactgtagctgcatttcaccaag

SEQ ID NO: 187 - DNA, 23 bp, Artificial Sequence
  Synthetic oligonucleotide
caactgtagctgcatttcaccaa

SEQ ID NO: 188 - DNA, 24 bp, Artificial Sequence
  Synthetic oligonucleotide
caactgtagctgcatttcaccaag

SEQ ID NO: 189 - DNA, 23 bp, Artificial Sequence
  Synthetic oligonucleotide
caactgtagctgcatttcaccaa

SEQ ID NO: 190 - DNA, 23 bp, Artificial Sequence
  Synthetic oligonucleotide
caactgtagctgcatttcaccaa

SEQ ID NO: 191 - DNA, 23 bp, Artificial Sequence
  Synthetic oligonucleotide
cacaactgtagctgcatttcacc

SEQ ID NO: 192 - DNA, 23 bp, Artificial Sequence
  Synthetic oligonucleotide
cacaactgtagctgcatttcacc

SEQ ID NO: 193 - DNA, 23 bp, Artificial Sequence
  Synthetic oligonucleotide
cacaactgtagctgcatttcacc

SEQ ID NO: 194 - DNA, 23 bp, Artificial Sequence
  Synthetic oligonucleotide
cacaactgtagctgcatttcacc

SEQ ID NO: 195 - DNA, 23 bp, Artificial Sequence
  Synthetic oligonucleotide
cacaactgtagctgcatttcacc

SEQ ID NO: 196 - DNA, 23 bp, Artificial Sequence
  Synthetic oligonucleotide
cacaactgtagctgcatttcacc

SEQ ID NO: 197 - DNA, 23 bp, Artificial Sequence
  Synthetic oligonucleotide
cacaactgtagctgcatttcacc

SEQ ID NO: 198 - DNA, 23 bp, Artificial Sequence
  Synthetic oligonucleotide
cacaactgtagctgcatttcacc

SEQ ID NO: 199 - DNA, 23 bp, Artificial Sequence
  Synthetic oligonucleotide
cacaactgtagctgcatttcacc

SEQ ID NO: 200 - DNA, 23 bp, Artificial Sequence
  Synthetic oligonucleotide
cacaactgtagctgcatttcacc

SEQ ID NO: 201 - DNA, 23 bp, Artificial Sequence
  Synthetic oligonucleotide
cacaactgtagctgcatttcacc

SEQ ID NO: 202 - DNA, 23 bp, Artificial Sequence
  Synthetic oligonucleotide
cacaactgtagctgcatttcacc

SEQ ID NO: 203 - DNA, 23 bp, Artificial Sequence
  Synthetic oligonucleotide
cacaactgtagctgcatttcacc

SEQ ID NO: 204 - DNA, 25 bp, Artificial Sequence
  Synthetic oligonucleotide
catcacaactgtagctgcatttcac

SEQ ID NO: 205 - DNA, 25 bp, Artificial Sequence
  Synthetic oligonucleotide
catcacaactgtagctgcatttcac

SEQ ID NO: 206 - DNA, 25 bp, Artificial Sequence
  Synthetic oligonucleotide
catcacaactgtagctgcatttcac

SEQ ID NO: 207 - DNA, 25 bp, Artificial Sequence
  Synthetic oligonucleotide
catcacaactgtagctgcatttcac

SEQ ID NO: 208 - DNA, 25 bp, Artificial Sequence
  Synthetic oligonucleotide
catcacaactgtagctgcatttcac

SEQ ID NO: 209 - DNA, 25 bp, Artificial Sequence
  Synthetic oligonucleotide
catcacaactgtagctgcatttcac

SEQ ID NO: 210 - DNA, 25 bp, Artificial Sequence
  Synthetic oligonucleotide
catcacaactgtagctgcatttcac

SEQ ID NO: 211 - DNA, 25 bp, Artificial Sequence
  Synthetic oligonucleotide
catcacaactgtagctgcatttcac

SEQ ID NO: 212 - DNA, 25 bp, Artificial Sequence
  Synthetic oligonucleotide
catcacaactgtagctgcatttcac

SEQ ID NO: 213 - DNA, 25 bp, Artificial Sequence
  Synthetic oligonucleotide
catcacaactgtagctgcatttcac

SEQ ID NO: 214 - DNA, 25 bp, Artificial Sequence
  Synthetic oligonucleotide
catcacaactgtagctgcatttcac

SEQ ID NO: 215 - DNA, 25 bp, Artificial Sequence
  Synthetic oligonucleotide
catcacaactgtagctgcatttcac

SEQ ID NO: 216 - DNA, 25 bp, Artificial Sequence
  Synthetic oligonucleotide
catcacaactgtagctgcatttcac

SEQ ID NO: 217 - DNA, 25 bp, Artificial Sequence
  Synthetic oligonucleotide
catcacaactgtagctgcatttcac

SEQ ID NO: 218 - DNA, 28 bp, Artificial Sequence
  Synthetic oligonucleotide
ctgcatttcaccaagaatgtagtttaca

SEQ ID NO: 219 - DNA, 28 bp, Artificial Sequence
  Synthetic oligonucleotide
ctgcatttcaccaagaatgtagtttaca

SEQ ID NO: 220 - DNA, 28 bp, Artificial Sequence
  Synthetic oligonucleotide
ctgcatttcaccaagaatgtagtttaca

SEQ ID NO: 221 - DNA, 28 bp, Artificial Sequence
  Synthetic oligonucleotide
ctgcatttcaccaagaatgtagtttaca

SEQ ID NO: 222 - DNA, 28 bp, Artificial Sequence
  Synthetic oligonucleotide
ctgcatttcaccaagaatgtagtttaca

SEQ ID NO: 223 - DNA, 28 bp, Artificial Sequence
  Synthetic oligonucleotide
ctgcatttcaccaagaatgtagtttaca

SEQ ID NO: 224 - DNA, 28 bp, Artificial Sequence
  Synthetic oligonucleotide
ctgcatttcaccaagaatgtagtttaca

SEQ ID NO: 225 - DNA, 28 bp, Artificial Sequence
  Synthetic oligonucleotide
ctgcatttcaccaagaatgtagtttaca

SEQ ID NO: 226 - DNA, 28 bp, Artificial Sequence
  Synthetic oligonucleotide
ctgcatttcaccaagaatgtagtttaca

SEQ ID NO: 227 - DNA, 28 bp, Artificial Sequence
  Synthetic oligonucleotide
ctgcatttcaccaagaatgtagtttaca

SEQ ID NO: 228 - DNA, 28 bp, Artificial Sequence
  Synthetic oligonucleotide
ctgcatttcaccaagaatgtagtttaca

SEQ ID NO: 229 - DNA, 25 bp, Artificial Sequence
  Synthetic oligonucleotide
ctgtagctgcatttcaccaagaatg

SEQ ID NO: 230 - DNA, 25 bp, Artificial Sequence
  Synthetic oligonucleotide
ctgtagctgcatttcaccaagaatg

SEQ ID NO: 231 - DNA, 25 bp, Artificial Sequence
  Synthetic oligonucleotide
ctgtagctgcatttcaccaagaatg

SEQ ID NO: 232 - DNA, 25 bp, Artificial Sequence
  Synthetic oligonucleotide
ctgtagctgcatttcaccaagaatg

SEQ ID NO: 233 - DNA, 25 bp, Artificial Sequence
  Synthetic oligonucleotide
ctgtagctgcatttcaccaagaatg

SEQ ID NO: 234 - DNA, 25 bp, Artificial Sequence
  Synthetic oligonucleotide
ctgtagctgcatttcaccaagaatg

SEQ ID NO: 235 - DNA, 25 bp, Artificial Sequence
  Synthetic oligonucleotide
ctgtagctgcatttcaccaagaatg

SEQ ID NO: 236 - DNA, 25 bp, Artificial Sequence
  Synthetic oligonucleotide
ctgtagctgcatttcaccaagaatg

SEQ ID NO: 237 - DNA, 25 bp, Artificial Sequence
  Synthetic oligonucleotide
ctgtagctgcatttcaccaagaatg

SEQ ID NO: 238 - DNA, 25 bp, Artificial Sequence
  Synthetic oligonucleotide
ctgtagctgcatttcaccaagaatg

SEQ ID NO: 239 - DNA, 25 bp, Artificial Sequence
  Synthetic oligonucleotide
ctgtagctgcatttcaccaagaatg

SEQ ID NO: 240 - DNA, 25 bp, Artificial Sequence
  Synthetic oligonucleotide
ctgtagctgcatttcaccaagaatg

SEQ ID NO: 241 - DNA, 25 bp, Artificial Sequence
  Synthetic oligonucleotide
ctgtagctgcatttcaccaagaatg

SEQ ID NO: 242 - DNA, 25 bp, Artificial Sequence
  Synthetic oligonucleotide
ctgtagctgcatttcaccaagaatg

SEQ ID NO: 243 - DNA, 25 bp, Artificial Sequence
  Synthetic oligonucleotide
gctgcatttcaccaagaatgtagtt

SEQ ID NO: 244 - DNA, 25 bp, Artificial Sequence
  Synthetic oligonucleotide
gctgcatttcaccaagaatgtagtt

SEQ ID NO: 245 - DNA, 25 bp, Artificial Sequence
  Synthetic oligonucleotide
gctgcatttcaccaagaatgtagtt

SEQ ID NO: 246 - DNA, 25 bp, Artificial Sequence
  Synthetic oligonucleotide
gctgcatttcaccaagaatgtagtt

SEQ ID NO: 247 - DNA, 27 bp, Artificial Sequence
  Synthetic oligonucleotide
gctgcatttcaccaagaatgtagttta

SEQ ID NO: 248 - DNA, 27 bp, Artificial Sequence
  Synthetic oligonucleotide
gctgcatttcaccaagaatgtagttta

SEQ ID NO: 249 - DNA, 28 bp, Artificial Sequence
  Synthetic oligonucleotide
gctgcatttcaccaagaatgtagtttac

SEQ ID NO: 250 - DNA, 28 bp, Artificial Sequence
  Synthetic oligonucleotide
gctgcatttcaccaagaatgtagtttac

SEQ ID NO: 251 - DNA, 28 bp, Artificial Sequence
  Synthetic oligonucleotide
gctgcatttcaccaagaatgtagtttac

SEQ ID NO: 252 - DNA, 28 bp, Artificial Sequence
  Synthetic oligonucleotide
gctgcatttcaccaagaatgtagtttac

SEQ ID NO: 253 - DNA, 28 bp, Artificial Sequence
  Synthetic oligonucleotide
gctgcatttcaccaagaatgtagtttac

SEQ ID NO: 254 - DNA, 28 bp, Artificial Sequence
  Synthetic oligonucleotide
gctgcatttcaccaagaatgtagtttac

SEQ ID NO: 255 - DNA, 28 bp, Artificial Sequence
  Synthetic oligonucleotide
gctgcatttcaccaagaatgtagtttac

SEQ ID NO: 256 - DNA, 28 bp, Artificial Sequence
  Synthetic oligonucleotide
gctgcatttcaccaagaatgtagtttac

SEQ ID NO: 257 - DNA, 28 bp, Artificial Sequence
  Synthetic oligonucleotide
gctgcatttcaccaagaatgtagtttac

SEQ ID NO: 258 - DNA, 28 bp, Artificial Sequence
  Synthetic oligonucleotide
gctgcatttcaccaagaatgtagtttac

SEQ ID NO: 259 - DNA, 28 bp, Artificial Sequence
  Synthetic oligonucleotide
gctgcatttcaccaagaatgtagtttac

SEQ ID NO: 260 - DNA, 27 bp, Artificial Sequence
  Synthetic oligonucleotide
gctgcatttcaccaagaatgtagttta

SEQ ID NO: 261 - DNA, 27 bp, Artificial Sequence
  Synthetic oligonucleotide
gctgcatttcaccaagaatgtagttta

SEQ ID NO: 262 - DNA, 27 bp, Artificial Sequence
  Synthetic oligonucleotide
gctgcatttcaccaagaatgtagttta

SEQ ID NO: 263 - DNA, 27 bp, Artificial Sequence
  Synthetic oligonucleotide
gctgcatttcaccaagaatgtagttta

SEQ ID NO: 264 - DNA, 26 bp, Artificial Sequence
  Synthetic oligonucleotide
gctgcatttcaccaagaatgtagttt

SEQ ID NO: 265 - DNA, 26 bp, Artificial Sequence
  Synthetic oligonucleotide
gctgcatttcaccaagaatgtagttt

SEQ ID NO: 266 - DNA, 27 bp, Artificial Sequence
  Synthetic oligonucleotide
gctgcatttcaccaagaatgtagttta

SEQ ID NO: 267 - DNA, 27 bp, Artificial Sequence
  Synthetic oligonucleotide
gctgcatttcaccaagaatgtagttta

SEQ ID NO: 268 - DNA, 27 bp, Artificial Sequence
  Synthetic oligonucleotide
gctgcatttcaccaagaatgtagttta

SEQ ID NO: 269 - DNA, 27 bp, Artificial Sequence
  Synthetic oligonucleotide
gctgcatttcaccaagaatgtagttta

SEQ ID NO: 270 - DNA, 27 bp, Artificial Sequence
  Synthetic oligonucleotide
gctgcatttcaccaagaatgtagttta

SEQ ID NO: 271 - DNA, 26 bp, Artificial Sequence
  Synthetic oligonucleotide
gctgcatttcaccaagaatgtagttt

SEQ ID NO: 272 - DNA, 26 bp, Artificial Sequence
  Synthetic oligonucleotide
gctgcatttcaccaagaatgtagttt

SEQ ID NO: 273 - DNA, 25 bp, Artificial Sequence
  Synthetic oligonucleotide
gctgcatttcaccaagaatgtagtt

SEQ ID NO: 274 - DNA, 26 bp, Artificial Sequence
  Synthetic oligonucleotide
gctgcatttcaccaagaatgtagttt

SEQ ID NO: 275 - DNA, 26 bp, Artificial Sequence
  Synthetic oligonucleotide
gctgcatttcaccaagaatgtagttt

SEQ ID NO: 276 - DNA, 26 bp, Artificial Sequence
  Synthetic oligonucleotide
gctgcatttcaccaagaatgtagttt

SEQ ID NO: 277 - DNA, 26 bp, Artificial Sequence
  Synthetic oligonucleotide
gctgcatttcaccaagaatgtagttt

SEQ ID NO: 278 - DNA, 26 bp, Artificial Sequence
  Synthetic oligonucleotide
gctgcatttcaccaagaatgtagttt

SEQ ID NO: 279 - DNA, 26 bp, Artificial Sequence
  Synthetic oligonucleotide
gctgcatttcaccaagaatgtagttt

SEQ ID NO: 280 - DNA, 26 bp, Artificial Sequence
  Synthetic oligonucleotide
gctgcatttcaccaagaatgtagttt

SEQ ID NO: 281 - DNA, 26 bp, Artificial Sequence
  Synthetic oligonucleotide
gtagctgcatttcaccaagaatgtag

SEQ ID NO: 282 - DNA, 26 bp, Artificial Sequence
  Synthetic oligonucleotide
gtagctgcatttcaccaagaatgtag

SEQ ID NO: 283 - DNA, 26 bp, Artificial Sequence
  Synthetic oligonucleotide
gtagctgcatttcaccaagaatgtag

SEQ ID NO: 284 - DNA, 26 bp, Artificial Sequence
  Synthetic oligonucleotide
gtagctgcatttcaccaagaatgtag

SEQ ID NO: 285 - DNA, 26 bp, Artificial Sequence
  Synthetic oligonucleotide
gtagctgcatttcaccaagaatgtag

SEQ ID NO: 286 - DNA, 26 bp, Artificial Sequence
  Synthetic oligonucleotide
gtagctgcatttcaccaagaatgtag

SEQ ID NO: 287 - DNA, 26 bp, Artificial Sequence
  Synthetic oligonucleotide
gtagctgcatttcaccaagaatgtag

SEQ ID NO: 288 - DNA, 26 bp, Artificial Sequence
  Synthetic oligonucleotide
gtagctgcatttcaccaagaatgtag

SEQ ID NO: 289 - DNA, 26 bp, Artificial Sequence
  Synthetic oligonucleotide
gtagctgcatttcaccaagaatgtag

SEQ ID NO: 290 - DNA, 29 bp, Artificial Sequence
  Synthetic oligonucleotide
tgcatttcaccaagaatgtagtttacagt

SEQ ID NO: 291 - DNA, 29 bp, Artificial Sequence
  Synthetic oligonucleotide
tgcatttcaccaagaatgtagtttacagt

SEQ ID NO: 292 - DNA, 29 bp, Artificial Sequence
  Synthetic oligonucleotide
tgcatttcaccaagaatgtagtttacagt

SEQ ID NO: 293 - DNA, 29 bp, Artificial Sequence
  Synthetic oligonucleotide
tgcatttcaccaagaatgtagtttacagt

SEQ ID NO: 294 - DNA, 29 bp, Artificial Sequence
  Synthetic oligonucleotide
tgcatttcaccaagaatgtagtttacagt

SEQ ID NO: 295 - DNA, 29 bp, Artificial Sequence
  Synthetic oligonucleotide
tgcatttcaccaagaatgtagtttacagt

SEQ ID NO: 296 - DNA, 29 bp, Artificial Sequence
  Synthetic oligonucleotide
tgcatttcaccaagaatgtagtttacagt

SEQ ID NO: 297 - DNA, 29 bp, Artificial Sequence
  Synthetic oligonucleotide
tgcatttcaccaagaatgtagtttacagt

SEQ ID NO: 298 - DNA, 29 bp, Artificial Sequence
  Synthetic oligonucleotide
tgcatttcaccaagaatgtagtttacagt

SEQ ID NO: 299 - DNA, 29 bp, Artificial Sequence
  Synthetic oligonucleotide
tgcatttcaccaagaatgtagtttacagt

SEQ ID NO: 300 - DNA, 26 bp, Artificial Sequence
  Synthetic oligonucleotide
tgtagctgcatttcaccaagaatgta

SEQ ID NO: 301 - DNA, 26 bp, Artificial Sequence
  Synthetic oligonucleotide
tgtagctgcatttcaccaagaatgta

SEQ ID NO: 302 - DNA, 25 bp, Artificial Sequence
  Synthetic oligonucleotide
tgtagctgcatttcaccaagaatgt

SEQ ID NO: 303 - DNA, 26 bp, Artificial Sequence
  Synthetic oligonucleotide
tgtagctgcatttcaccaagaatgta

SEQ ID NO: 304 - DNA, 26 bp, Artificial Sequence
  Synthetic oligonucleotide
tgtagctgcatttcaccaagaatgta

SEQ ID NO: 305 - DNA, 26 bp, Artificial Sequence
  Synthetic oligonucleotide
tgtagctgcatttcaccaagaatgta

SEQ ID NO: 306 - DNA, 26 bp, Artificial Sequence
  Synthetic oligonucleotide
tgtagctgcatttcaccaagaatgta

SEQ ID NO: 307 - DNA, 25 bp, Artificial Sequence
  Synthetic oligonucleotide
tgtagctgcatttcaccaagaatgt

SEQ ID NO: 308 - DNA, 25 bp, Artificial Sequence
  Synthetic oligonucleotide
tgtagctgcatttcaccaagaatgt

SEQ ID NO: 309 - DNA, 26 bp, Artificial Sequence
  Synthetic oligonucleotide
tgtagctgcatttcaccaagaatgta

SEQ ID NO: 310 - DNA, 26 bp, Artificial Sequence
  Synthetic oligonucleotide
tgtagctgcatttcaccaagaatgta

SEQ ID NO: 311 - DNA, 26 bp, Artificial Sequence
  Synthetic oligonucleotide
tgtagctgcatttcaccaagaatgta

SEQ ID NO: 312 - DNA, 26 bp, Artificial Sequence
  Synthetic oligonucleotide
tgtagctgcatttcaccaagaatgta

SEQ ID NO: 313 - DNA, 26 bp, Artificial Sequence
  Synthetic oligonucleotide
tgtagctgcatttcaccaagaatgta

SEQ ID NO: 314 - DNA, 25 bp, Artificial Sequence
  Synthetic oligonucleotide
tgtagctgcatttcaccaagaatgt

SEQ ID NO: 315 - DNA, 25 bp, Artificial Sequence
  Synthetic oligonucleotide
tgtagctgcatttcaccaagaatgt

SEQ ID NO: 316 - DNA, 25 bp, Artificial Sequence
  Synthetic oligonucleotide
tgtagctgcatttcaccaagaatgt

SEQ ID NO: 317 - DNA, 25 bp, Artificial Sequence
  Synthetic oligonucleotide
tgtagctgcatttcaccaagaatgt

SEQ ID NO: 318 - DNA, 25 bp, Artificial Sequence
  Synthetic oligonucleotide
tgtagctgcatttcaccaagaatgt

SEQ ID NO: 319 - DNA, 25 bp, Artificial Sequence
  Synthetic oligonucleotide
tgtagctgcatttcaccaagaatgt

SEQ ID NO: 320 - DNA, 25 bp, Artificial Sequence
  Synthetic oligonucleotide
tgtagctgcatttcaccaagaatgt

SEQ ID NO: 321 - DNA, 25 bp, Artificial Sequence
  Synthetic oligonucleotide
tgtagctgcatttcaccaagaatgt

SEQ ID NO: 322 - DNA, 25 bp, Artificial Sequence
  Synthetic oligonucleotide
tgtagctgcatttcaccaagaatgt

SEQ ID NO: 323 - DNA, 25 bp, Artificial Sequence
  Synthetic oligonucleotide
tgtagctgcatttcaccaagaatgt

SEQ ID NO: 324 - DNA, 25 bp, Artificial Sequence
  Synthetic oligonucleotide
gtcacgcctaaacgaacatgaaatt

SEQ ID NO: 325 - DNA, 25 bp, Artificial Sequence
  Synthetic oligonucleotide
gtcacgcctaaacgaacatgaaatt

SEQ ID NO: 326 - DNA, 25 bp, Artificial Sequence
  Synthetic oligonucleotide
gtcacgcctaaacgaacatgaaatt

SEQ ID NO: 327 - DNA, 23 bp, Artificial Sequence
  Synthetic oligonucleotide
caccacgcacattgctaactaag

SEQ ID NO: 328 - DNA, 31 bp, Artificial Sequence
  Synthetic oligonucleotide
tcaaaccttttgagagagatatttcaactga

SEQ ID NO: 329 - DNA, 25 bp, Artificial Sequence
  Synthetic oligonucleotide
gcaggtatatgcgctagttatcaga

SEQ ID NO: 330 - DNA, 25 bp, Artificial Sequence
  Synthetic oligonucleotide
gcaggtatatgcgctagttatcaga

SEQ ID NO: 331 - DNA, 21 bp, Artificial Sequence
  Synthetic oligonucleotide
cgtgatctccctcagggtttt

SEQ ID NO: 332 - DNA, 20 bp, Artificial Sequence
  Synthetic oligonucleotide
cgtgatctccctcagggttt

SEQ ID NO: 333 - DNA, 20 bp, Artificial Sequence
  Synthetic oligonucleotide
cgtgatctccctcagggttt

SEQ ID NO: 334 - DNA, 21 bp, Artificial Sequence
  Synthetic oligonucleotide
cgtgatctccctcagggtttt

SEQ ID NO: 335 - DNA, 21 bp, Artificial Sequence
  Synthetic oligonucleotide
cgtgatctccctcagggtttt

SEQ ID NO: 336 - DNA, 25 bp, Artificial Sequence
  Synthetic oligonucleotide
agtttctgcctttccaacaatttgg

SEQ ID NO: 337 - DNA, 23 bp, Artificial Sequence
  Synthetic oligonucleotide
gtttctgcctttccaacaatttg

SEQ ID NO: 338 - DNA, 23 bp, Artificial Sequence
  Synthetic oligonucleotide
gtttctgcctttccaacaatttg

SEQ ID NO: 339 - DNA, 23 bp, Artificial Sequence
  Synthetic oligonucleotide
gtttctgcctttccaacaatttg

SEQ ID NO: 340 - DNA, 26 bp, Artificial Sequence
  Synthetic oligonucleotide
acaaaaagtttctgcctttccaacaa

SEQ ID NO: 341 - DNA, 26 bp, Artificial Sequence
  Synthetic oligonucleotide
acaaaaagtttctgcctttccaacaa

SEQ ID NO: 342 - DNA, 26 bp, Artificial Sequence
  Synthetic oligonucleotide
acaaaaagtttctgcctttccaacaa

SEQ ID NO: 343 - DNA, 26 bp, Artificial Sequence
  Synthetic oligonucleotide
acaaaaagtttctgcctttccaacaa

SEQ ID NO: 344 - DNA, 27 bp, Artificial Sequence
  Synthetic oligonucleotide
acaaaaagtttctgcctttccaacaat

SEQ ID NO: 345 - DNA, 27 bp, Artificial Sequence
  Synthetic oligonucleotide
acaaaaagtttctgcctttccaacaat

SEQ ID NO: 346 - DNA, 26 bp, Artificial Sequence
  Synthetic oligonucleotide
acaaaaagtttctgcctttccaacaa

SEQ ID NO: 347 - DNA, 27 bp, Artificial Sequence
  Synthetic oligonucleotide
acaaaaagtttctgcctttccaacaat

SEQ ID NO: 348 - DNA, 27 bp, Artificial Sequence
  Synthetic oligonucleotide
acaaaaagtttctgcctttccaacaat

SEQ ID NO: 349 - DNA, 27 bp, Artificial Sequence
  Synthetic oligonucleotide
acaaaaagtttctgcctttccaacaat

SEQ ID NO: 350 - DNA, 28 bp, Artificial Sequence
  Synthetic oligonucleotide
acaaaaagtttctgcctttccaacaatt

SEQ ID NO: 351 - DNA, 28 bp, Artificial Sequence
  Synthetic oligonucleotide
acaaaaagtttctgcctttccaacaatt

SEQ ID NO: 352 - DNA, 25 bp, Artificial Sequence
  Synthetic oligonucleotide
agtttctgcctttccaacaatttgg

SEQ ID NO: 353 - DNA, 25 bp, Artificial Sequence
  Synthetic oligonucleotide
agtttctgcctttccaacaatttgg

SEQ ID NO: 354 - DNA, 25 bp, Artificial Sequence
  Synthetic oligonucleotide
agtttctgcctttccaacaatttgg

SEQ ID NO: 355 - DNA, 25 bp, Artificial Sequence
  Synthetic oligonucleotide
agtttctgcctttccaacaatttgg

SEQ ID NO: 356 - DNA, 25 bp, Artificial Sequence
  Synthetic oligonucleotide
agtttctgcctttccaacaatttgg

SEQ ID NO: 357 - DNA, 25 bp, Artificial Sequence
  Synthetic oligonucleotide
agtttctgcctttccaacaatttgg

SEQ ID NO: 358 - DNA, 25 bp, Artificial Sequence
  Synthetic oligonucleotide
agtttctgcctttccaacaatttgg

SEQ ID NO: 359 - DNA, 25 bp, Artificial Sequence
  Synthetic oligonucleotide
agtttctgcctttccaacaatttgg

SEQ ID NO: 360 - DNA, 25 bp, Artificial Sequence
  Synthetic oligonucleotide
agtttctgcctttccaacaatttgg

SEQ ID NO: 361 - DNA, 25 bp, Artificial Sequence
  Synthetic oligonucleotide
agtttctgcctttccaacaatttgg

SEQ ID NO: 362 - DNA, 25 bp, Artificial Sequence
  Synthetic oligonucleotide
agtttctgcctttccaacaatttgg

SEQ ID NO: 363 - DNA, 25 bp, Artificial Sequence
  Synthetic oligonucleotide
agtttctgcctttccaacaatttgg

SEQ ID NO: 364 - DNA, 28 bp, Artificial Sequence
  Synthetic oligonucleotide
ctaacaaaaagtttctgcctttccaaca

SEQ ID NO: 365 - DNA, 28 bp, Artificial Sequence
  Synthetic oligonucleotide
ctaacaaaaagtttctgcctttccaaca

SEQ ID NO: 366 - DNA, 28 bp, Artificial Sequence
  Synthetic oligonucleotide
ctgagtctaacaaaaagtttctgccttt

SEQ ID NO: 367 - DNA, 28 bp, Artificial Sequence
  Synthetic oligonucleotide
ctgagtctaacaaaaagtttctgccttt

SEQ ID NO: 368 - DNA, 22 bp, Artificial Sequence
  Synthetic oligonucleotide
ctgcctttccaacaatttggca

SEQ ID NO: 369 - DNA, 22 bp, Artificial Sequence
  Synthetic oligonucleotide
ctgcctttccaacaatttggca

SEQ ID NO: 370 - DNA, 22 bp, Artificial Sequence
  Synthetic oligonucleotide
gcctttccaacaatttggcaga

SEQ ID NO: 371 - DNA, 22 bp, Artificial Sequence
  Synthetic oligonucleotide
gcctttccaacaatttggcaga

SEQ ID NO: 372 - DNA, 27 bp, Artificial Sequence
  Synthetic oligonucleotide
gtctaacaaaaagtttctgcctttcca

SEQ ID NO: 373 - DNA, 28 bp, Artificial Sequence
  Synthetic oligonucleotide
gtctaacaaaaagtttctgcctttccaa

SEQ ID NO: 374 - DNA, 28 bp, Artificial Sequence
  Synthetic oligonucleotide
gtctaacaaaaagtttctgcctttccaa

SEQ ID NO: 375 - DNA, 27 bp, Artificial Sequence
  Synthetic oligonucleotide
gtctaacaaaaagtttctgcctttcca

SEQ ID NO: 376 - DNA, 27 bp, Artificial Sequence
  Synthetic oligonucleotide
gtctaacaaaaagtttctgcctttcca

SEQ ID NO: 377 - DNA, 27 bp, Artificial Sequence
  Synthetic oligonucleotide
gtctaacaaaaagtttctgcctttcca

SEQ ID NO: 378 - DNA, 27 bp, Artificial Sequence
  Synthetic oligonucleotide
gtctaacaaaaagtttctgcctttcca

SEQ ID NO: 379 - DNA, 22 bp, Artificial Sequence
  Synthetic oligonucleotide
tctgcctttccaacaatttggc

SEQ ID NO: 380 - DNA, 22 bp, Artificial Sequence
  Synthetic oligonucleotide
tctgcctttccaacaatttggc

SEQ ID NO: 381 - DNA, 24 bp, Artificial Sequence
  Synthetic oligonucleotide
tgcgctagttatcagactcagact

SEQ ID NO: 382 - DNA, 25 bp, Artificial Sequence
  Synthetic oligonucleotide
cacgtagtgtagctagtcaatccat

SEQ ID NO: 383 - DNA, 23 bp, Artificial Sequence
  Synthetic oligonucleotide
ccatcattgcctacactatgtca

SEQ ID NO: 384 - DNA, 23 bp, Artificial Sequence
  Synthetic oligonucleotide
ccatcattgcctacactatgtca

SEQ ID NO: 385 - DNA, 23 bp, Artificial Sequence
  Synthetic oligonucleotide
ccatcattgcctacactatgtca

SEQ ID NO: 386 - DNA, 23 bp, Artificial Sequence
  Synthetic oligonucleotide
ccatcattgcctacactatgtca

SEQ ID NO: 387 - DNA, 26 bp, Artificial Sequence
  Synthetic oligonucleotide
acgtagtgtagctagtcaatccatca

SEQ ID NO: 388 - DNA, 24 bp, Artificial Sequence
  Synthetic oligonucleotide
cacgtagtgtagctagtcaatcca

SEQ ID NO: 389 - DNA, 25 bp, Artificial Sequence
  Synthetic oligonucleotide
cacgtagtgtagctagtcaatccat

SEQ ID NO: 390 - DNA, 24 bp, Artificial Sequence
  Synthetic oligonucleotide
cacgtagtgtagctagtcaatcca

SEQ ID NO: 391 - DNA, 25 bp, Artificial Sequence
  Synthetic oligonucleotide
cacgtagtgtagctagtcaatccat

SEQ ID NO: 392 - DNA, 24 bp, Artificial Sequence
  Synthetic oligonucleotide
gcacgtagtgtagctagtcaatcc

SEQ ID NO: 393 - DNA, 24 bp, Artificial Sequence
  Synthetic oligonucleotide
gcacgtagtgtagctagtcaatcc

SEQ ID NO: 394 - DNA, 27 bp, Artificial Sequence
  Synthetic oligonucleotide
aggacttgttcttacctttcttttcca

SEQ ID NO: 395 - DNA, 27 bp, Artificial Sequence
  Synthetic oligonucleotide
aggacttgttcttacctttcttttcca

SEQ ID NO: 396 - DNA, 31 bp, Artificial Sequence
  Synthetic oligonucleotide
tggtagatttgccaataggtattaacatcac

SEQ ID NO: 397 - DNA, 25 bp, Artificial Sequence
  Synthetic oligonucleotide
cacacactggtttgtaacacaaagg

SEQ ID NO: 398 - DNA, 26 bp, Artificial Sequence
  Synthetic oligonucleotide
cacaaaggaatttttatgaaccacaa

SEQ ID NO: 399 - DNA, 26 bp, Artificial Sequence
  Synthetic oligonucleotide
cacaaaggaatttttatgaaccacaa

SEQ ID NO: 400 - DNA, 26 bp, Artificial Sequence
  Synthetic oligonucleotide
cacaaaggaatttttatgaaccacaa

SEQ ID NO: 401 - DNA, 26 bp, Artificial Sequence
  Synthetic oligonucleotide
cacaaaggaatttttatgaaccacaa

SEQ ID NO: 402 - DNA, 36 bp, Artificial Sequence
  Synthetic oligonucleotide
ggttattttaaaatatattctaagcacacgcctatt

SEQ ID NO: 403 - DNA, 34 bp, Artificial Sequence
  Synthetic oligonucleotide
ttattttaaaatatattctaagcacacgcctatt

SEQ ID NO: 404 - DNA, 29 bp, Artificial Sequence
  Synthetic oligonucleotide
ttaaaatatattctaagcacacgcctatt

SEQ ID NO: 405 - DNA, 29 bp, Artificial Sequence
  Synthetic oligonucleotide
ttaaaatatattctaagcacacgcctatt

SEQ ID NO: 406 - DNA, 29 bp, Artificial Sequence
  Synthetic oligonucleotide
ttaaaatatattctaagcacacgcctatt

SEQ ID NO: 407 - DNA, 30 bp, Artificial Sequence
  Synthetic oligonucleotide
gccaataggtattaacatcactaggtttca

SEQ ID NO: 408 - DNA, 30 bp, Artificial Sequence; identical to SEQ ID NO: 407
  Synthetic oligonucleotide

SEQ ID NO: 409 - DNA, 30 bp, Artificial Sequence; identical to SEQ ID NO: 407
  Synthetic oligonucleotide

SEQ ID NO: 410 - DNA, 27 bp, Artificial Sequence
  Synthetic oligonucleotide
ggaacaaatacttctaaccaggttgct

SEQ ID NO: 411 - DNA, 25 bp, Artificial Sequence
  Synthetic oligonucleotide
aaatacttctaaccaggttgctgtt

SEQ ID NO: 412 - DNA, 30 bp, Artificial Sequence
  Synthetic oligonucleotide
acaatcttgattctaaggttggtggtaatt

SEQ ID NO: 413 - DNA, 24 bp, Artificial Sequence
  Synthetic oligonucleotide
atttaggtgacatctctggcatta

SEQ ID NO: 414 - DNA, 27 bp, Artificial Sequence
  Synthetic oligonucleotide
acaaatacttctaaccaggttgctgtt

SEQ ID NO: 415 - DNA, 27 bp, Artificial Sequence
  Synthetic oligonucleotide
acaaatacttctaaccaggttgctgtt

SEQ ID NO: 416 - DNA, 27 bp, Artificial Sequence
  Synthetic oligonucleotide
acaccaggaacaaatacttctaaccag

SEQ ID NO: 417 - DNA, 27 bp, Artificial Sequence
  Synthetic oligonucleotide
acaccaggaacaaatacttctaaccag

SEQ ID NO: 418 - DNA, 27 bp, Artificial Sequence
  Synthetic oligonucleotide
acaccaggaacaaatacttctaaccag

SEQ ID NO: 419 - DNA, 27 bp, Artificial Sequence
  Synthetic oligonucleotide
ccaggaacaaatacttctaaccaggtt

SEQ ID NO: 420 - DNA, 27 bp, Artificial Sequence
  Synthetic oligonucleotide
ccaggaacaaatacttctaaccaggtt

SEQ ID NO: 421 - DNA, 27 bp, Artificial Sequence
  Synthetic oligonucleotide
ccaggaacaaatacttctaaccaggtt

SEQ ID NO: 422 - DNA, 27 bp, Artificial Sequence
  Synthetic oligonucleotide
ccaggaacaaatacttctaaccaggtt

SEQ ID NO: 423 - DNA, 27 bp, Artificial Sequence
  Synthetic oligonucleotide
ccaggaacaaatacttctaaccaggtt

SEQ ID NO: 424 - DNA, 27 bp, Artificial Sequence
  Synthetic oligonucleotide
ccaggaacaaatacttctaaccaggtt

SEQ ID NO: 425 - DNA, 27 bp, Artificial Sequence
  Synthetic oligonucleotide
ccaggaacaaatacttctaaccaggtt

SEQ ID NO: 426 - DNA, 27 bp, Artificial Sequence
  Synthetic oligonucleotide
ccaggaacaaatacttctaaccaggtt

SEQ ID NO: 427 - DNA, 27 bp, Artificial Sequence
  Synthetic oligonucleotide
gaacaaatacttctaaccaggttgctg

SEQ ID NO: 428 - DNA, 27 bp, Artificial Sequence
  Synthetic oligonucleotide
gaacaaatacttctaaccaggttgctg

SEQ ID NO: 429 - DNA, 27 bp, Artificial Sequence
  Synthetic oligonucleotide
gaacaaatacttctaaccaggttgctg

SEQ ID NO: 430 - DNA, 26 bp, Artificial Sequence
  Synthetic oligonucleotide
ggaacaaatacttctaaccaggttgc

SEQ ID NO: 431 - DNA, 26 bp, Artificial Sequence
  Synthetic oligonucleotide
ggaacaaatacttctaaccaggttgc

SEQ ID NO: 432 - DNA, 26 bp, Artificial Sequence
  Synthetic oligonucleotide
ggaacaaatacttctaaccaggttgc

SEQ ID NO: 433 - DNA, 27 bp, Artificial Sequence
  Synthetic oligonucleotide
ggaacaaatacttctaaccaggttgct

SEQ ID NO: 434 - DNA, 27 bp, Artificial Sequence
  Synthetic oligonucleotide
ggaacaaatacttctaaccaggttgct

SEQ ID NO: 435 - DNA, 27 bp, Artificial Sequence
  Synthetic oligonucleotide
ggaacaaatacttctaaccaggttgct

SEQ ID NO: 436 - DNA, 26 bp, Artificial Sequence
  Synthetic oligonucleotide
ggaacaaatacttctaaccaggttgc

SEQ ID NO: 437 - DNA, 27 bp, Artificial Sequence
  Synthetic oligonucleotide
ggaacaaatacttctaaccaggttgct

SEQ ID NO: 438 - DNA, 27 bp, Artificial Sequence
  Synthetic oligonucleotide
ggaacaaatacttctaaccaggttgct

SEQ ID NO: 439 - DNA, 27 bp, Artificial Sequence
  Synthetic oligonucleotide
ggaacaaatacttctaaccaggttgct

SEQ ID NO: 440 - DNA, 27 bp, Artificial Sequence
  Synthetic oligonucleotide
ggaacaaatacttctaaccaggttgct

SEQ ID NO: 441 - DNA, 25 bp, Artificial Sequence
  Synthetic oligonucleotide
cccaagaagtttttgcacaagtcaa

SEQ ID NO: 442 - DNA, 25 bp, Artificial Sequence
  Synthetic oligonucleotide
cccaagaagtttttgcacaagtcaa

SEQ ID NO: 443 - DNA, 25 bp, Artificial Sequence
  Synthetic oligonucleotide
cccaagaagtttttgcacaagtcaa

SEQ ID NO: 444 - DNA, 24 bp, Artificial Sequence
  Synthetic oligonucleotide
tctctgggaccaatggtactaaga

SEQ ID NO: 445 - DNA, 20 bp, Artificial Sequence
  Synthetic oligonucleotide
tctctgggaccaatggtact

SEQ ID NO: 446 - DNA, 24 bp, Artificial Sequence
  Synthetic oligonucleotide
tctctgggaccaatggtactaaga

SEQ ID NO: 447 - DNA, 22 bp, Artificial Sequence
  Synthetic oligonucleotide
ctctgggaccaatggtactaag

SEQ ID NO: 448 - DNA, 29 bp, Artificial Sequence
  Synthetic oligonucleotide
aatgttacttggttccatgctatacatgt

SEQ ID NO: 449 - DNA, 23 bp, Artificial Sequence
  Synthetic oligonucleotide
acatgtctctgggaccaatggta

SEQ ID NO: 450 - DNA, 23 bp, Artificial Sequence
  Synthetic oligonucleotide
acatgtctctgggaccaatggta

SEQ ID NO: 451 - DNA, 23 bp, Artificial Sequence
  Synthetic oligonucleotide
acatgtctctgggaccaatggta

SEQ ID NO: 452 - DNA, 23 bp, Artificial Sequence
  Synthetic oligonucleotide
acatgtctctgggaccaatggta

SEQ ID NO: 453 - DNA, 23 bp, Artificial Sequence
  Synthetic oligonucleotide
acatgtctctgggaccaatggta

SEQ ID NO: 454 - DNA, 23 bp, Artificial Sequence
  Synthetic oligonucleotide
acatgtctctgggaccaatggta

SEQ ID NO: 455 - DNA, 23 bp, Artificial Sequence
  Synthetic oligonucleotide
acatgtctctgggaccaatggta

SEQ ID NO: 456 - DNA, 23 bp, Artificial Sequence
  Synthetic oligonucleotide
acatgtctctgggaccaatggta

SEQ ID NO: 457 - DNA, 23 bp, Artificial Sequence
  Synthetic oligonucleotide
acatgtctctgggaccaatggta

SEQ ID NO: 458 - DNA, 23 bp, Artificial Sequence
  Synthetic oligonucleotide
acatgtctctgggaccaatggta

SEQ ID NO: 459 - DNA, 23 bp, Artificial Sequence
  Synthetic oligonucleotide
acatgtctctgggaccaatggta

SEQ ID NO: 460 - DNA, 23 bp, Artificial Sequence
  Synthetic oligonucleotide
catgtctctgggaccaatggtac

SEQ ID NO: 461 - DNA, 23 bp, Artificial Sequence
  Synthetic oligonucleotide
catgtctctgggaccaatggtac

SEQ ID NO: 462 - DNA, 23 bp, Artificial Sequence
  Synthetic oligonucleotide
catgtctctgggaccaatggtac

SEQ ID NO: 463 - DNA, 21 bp, Artificial Sequence
  Synthetic oligonucleotide
catgtctctgggaccaatggt

SEQ ID NO: 464 - DNA, 21 bp, Artificial Sequence
  Synthetic oligonucleotide
catgtctctgggaccaatggt

SEQ ID NO: 465 - DNA, 21 bp, Artificial Sequence
  Synthetic oligonucleotide
catgtctctgggaccaatggt

SEQ ID NO: 466 - DNA, 21 bp, Artificial Sequence
  Synthetic oligonucleotide
catgtctctgggaccaatggt

SEQ ID NO: 467 - DNA, 21 bp, Artificial Sequence
  Synthetic oligonucleotide
catgtctctgggaccaatggt

SEQ ID NO: 468 - DNA, 21 bp, Artificial Sequence
  Synthetic oligonucleotide
catgtctctgggaccaatggt

SEQ ID NO: 469 - DNA, 21 bp, Artificial Sequence
  Synthetic oligonucleotide
catgtctctgggaccaatggt

SEQ ID NO: 470 - DNA, 21 bp, Artificial Sequence
  Synthetic oligonucleotide
catgtctctgggaccaatggt

SEQ ID NO: 471 - DNA, 21 bp, Artificial Sequence
  Synthetic oligonucleotide
catgtctctgggaccaatggt

SEQ ID NO: 472 - DNA, 25 bp, Artificial Sequence
  Synthetic oligonucleotide
ctatacatgtctctgggaccaatgg

SEQ ID NO: 473 - DNA, 25 bp, Artificial Sequence
  Synthetic oligonucleotide
ctatacatgtctctgggaccaatgg

SEQ ID NO: 474 - DNA, 25 bp, Artificial Sequence
  Synthetic oligonucleotide
ctatacatgtctctgggaccaatgg

SEQ ID NO: 475 - DNA, 25 bp, Artificial Sequence
  Synthetic oligonucleotide
ctatacatgtctctgggaccaatgg

SEQ ID NO: 476 - DNA, 25 bp, Artificial Sequence
  Synthetic oligonucleotide
ctatacatgtctctgggaccaatgg

SEQ ID NO: 477 - DNA, 25 bp, Artificial Sequence
  Synthetic oligonucleotide
ctatacatgtctctgggaccaatgg

SEQ ID NO: 478 - DNA, 25 bp, Artificial Sequence
  Synthetic oligonucleotide
ctatacatgtctctgggaccaatgg

SEQ ID NO: 479 - DNA, 25 bp, Artificial Sequence
  Synthetic oligonucleotide
ctatacatgtctctgggaccaatgg

SEQ ID NO: 480 - DNA, 25 bp, Artificial Sequence
  Synthetic oligonucleotide
ctatacatgtctctgggaccaatgg

SEQ ID NO: 481 - DNA, 26 bp, Artificial Sequence
  Synthetic oligonucleotide
cttggttccatgctatacatgtctct

SEQ ID NO: 482 - DNA, 26 bp, Artificial Sequence
  Synthetic oligonucleotide
cttggttccatgctatacatgtctct

SEQ ID NO: 483 - DNA, 26 bp, Artificial Sequence
  Synthetic oligonucleotide
cttggttccatgctatacatgtctct

SEQ ID NO: 484 - DNA, 26 bp, Artificial Sequence
  Synthetic oligonucleotide
cttggttccatgctatacatgtctct

SEQ ID NO: 485 - DNA, 26 bp, Artificial Sequence
  Synthetic oligonucleotide
cttggttccatgctatacatgtctct

SEQ ID NO: 486 - DNA, 25 bp, Artificial Sequence
  Synthetic oligonucleotide
gctatacatgtctctgggaccaatg

SEQ ID NO: 487 - DNA, 25 bp, Artificial Sequence
  Synthetic oligonucleotide
gctatacatgtctctgggaccaatg

SEQ ID NO: 488 - DNA, 25 bp, Artificial Sequence
  Synthetic oligonucleotide
gctatacatgtctctgggaccaatg

SEQ ID NO: 489 - DNA, 25 bp, Artificial Sequence
  Synthetic oligonucleotide
gctatacatgtctctgggaccaatg

SEQ ID NO: 490 - DNA, 25 bp, Artificial Sequence
  Synthetic oligonucleotide
gctatacatgtctctgggaccaatg

SEQ ID NO: 491 - DNA, 25 bp, Artificial Sequence
  Synthetic oligonucleotide
gctatacatgtctctgggaccaatg

SEQ ID NO: 492 - DNA, 25 bp, Artificial Sequence
  Synthetic oligonucleotide
gctatacatgtctctgggaccaatg

SEQ ID NO: 493 - DNA, 25 bp, Artificial Sequence
  Synthetic oligonucleotide
gctatacatgtctctgggaccaatg

SEQ ID NO: 494 - DNA, 25 bp, Artificial Sequence
  Synthetic oligonucleotide
gctatacatgtctctgggaccaatg

SEQ ID NO: 495 - DNA, 25 bp, Artificial Sequence
  Synthetic oligonucleotide
gctatacatgtctctgggaccaatg

SEQ ID NO: 496 - DNA, 28 bp, Artificial Sequence
  Synthetic oligonucleotide
gttacttggttccatgctatacatgtct

SEQ ID NO: 497 - DNA, 28 bp, Artificial Sequence
  Synthetic oligonucleotide
gttacttggttccatgctatacatgtct

SEQ ID NO: 498 - DNA, 28 bp, Artificial Sequence
  Synthetic oligonucleotide
gttacttggttccatgctatacatgtct

SEQ ID NO: 499 - DNA, 24 bp, Artificial Sequence
  Synthetic oligonucleotide
tgctatacatgtctctgggaccaa

SEQ ID NO: 500 - DNA, 24 bp, Artificial Sequence
  Synthetic oligonucleotide
tgctatacatgtctctgggaccaa

SEQ ID NO: 501 - DNA, 24 bp, Artificial Sequence
  Synthetic oligonucleotide
tgctatacatgtctctgggaccaa

SEQ ID NO: 502 - DNA, 24 bp, Artificial Sequence
  Synthetic oligonucleotide
tgctatacatgtctctgggaccaa

SEQ ID NO: 503 - DNA, 24 bp, Artificial Sequence
  Synthetic oligonucleotide
tgctatacatgtctctgggaccaa

SEQ ID NO: 504 - DNA, 24 bp, Artificial Sequence
  Synthetic oligonucleotide
tgctatacatgtctctgggaccaa

SEQ ID NO: 505 - DNA, 24 bp, Artificial Sequence
  Synthetic oligonucleotide
tgctatacatgtctctgggaccaa

SEQ ID NO: 506 - DNA, 24 bp, Artificial Sequence
  Synthetic oligonucleotide
tgctatacatgtctctgggaccaa

SEQ ID NO: 507 - DNA, 24 bp, Artificial Sequence
  Synthetic oligonucleotide
tgctatacatgtctctgggaccaa

SEQ ID NO: 508 - DNA, 25 bp, Artificial Sequence
  Synthetic oligonucleotide
tgctatacatgtctctgggaccaat

SEQ ID NO: 509 - DNA, 25 bp, Artificial Sequence
  Synthetic oligonucleotide
tgctatacatgtctctgggaccaat

SEQ ID NO: 510 - DNA, 25 bp, Artificial Sequence
  Synthetic oligonucleotide
tgctatacatgtctctgggaccaat

SEQ ID NO: 511 - DNA, 25 bp, Artificial Sequence
  Synthetic oligonucleotide
tgctatacatgtctctgggaccaat

SEQ ID NO: 512 - DNA, 25 bp, Artificial Sequence
  Synthetic oligonucleotide
tgctatacatgtctctgggaccaat

SEQ ID NO: 513 - DNA, 25 bp, Artificial Sequence
  Synthetic oligonucleotide
tgctatacatgtctctgggaccaat

SEQ ID NO: 514 - DNA, 25 bp, Artificial Sequence
  Synthetic oligonucleotide
tgctatacatgtctctgggaccaat

SEQ ID NO: 515 - DNA, 24 bp, Artificial Sequence
  Synthetic oligonucleotide
tgctatacatgtctctgggaccaa

SEQ ID NO: 516 - DNA, 24 bp, Artificial Sequence
  Synthetic oligonucleotide
tgctatacatgtctctgggaccaa

SEQ ID NO: 517 - DNA, 25 bp, Artificial Sequence
  Synthetic oligonucleotide
tgctatacatgtctctgggaccaat

SEQ ID NO: 518 - DNA, 25 bp, Artificial Sequence
  Synthetic oligonucleotide
tgctatacatgtctctgggaccaat

SEQ ID NO: 519 - DNA, 25 bp, Artificial Sequence
  Synthetic oligonucleotide
tgctatacatgtctctgggaccaat

SEQ ID NO: 520 - DNA, 25 bp, Artificial Sequence
  Synthetic oligonucleotide
tgctatacatgtctctgggaccaat

SEQ ID NO: 521 - DNA, 23 bp, Artificial Sequence
  Synthetic oligonucleotide
tgctatacatgtctctgggacca

SEQ ID NO: 522 - DNA, 23 bp, Artificial Sequence
  Synthetic oligonucleotide
tgctatacatgtctctgggacca

SEQ ID NO: 523 - DNA, 23 bp, Artificial Sequence
  Synthetic oligonucleotide
tgctatacatgtctctgggacca

SEQ ID NO: 524 - DNA, 22 bp, Artificial Sequence
  Synthetic oligonucleotide
tgtctctgggaccaatggtact

SEQ ID NO: 525 - DNA, 22 bp, Artificial Sequence
  Synthetic oligonucleotide
tgtctctgggaccaatggtact

SEQ ID NO: 526 - DNA, 22 bp, Artificial Sequence
  Synthetic oligonucleotide
tgtctctgggaccaatggtact

SEQ ID NO: 527 - DNA, 22 bp, Artificial Sequence
  Synthetic oligonucleotide
tgtctctgggaccaatggtact

SEQ ID NO: 528 - DNA, 22 bp, Artificial Sequence
  Synthetic oligonucleotide
tgtctctgggaccaatggtact

SEQ ID NO: 529 - DNA, 22 bp, Artificial Sequence
  Synthetic oligonucleotide
tgtctctgggaccaatggtact

SEQ ID NO: 530 - DNA, 22 bp, Artificial Sequence
  Synthetic oligonucleotide
tgtctctgggaccaatggtact

SEQ ID NO: 531 - DNA, 22 bp, Artificial Sequence
  Synthetic oligonucleotide
tgtctctgggaccaatggtact

SEQ ID NO: 532 - DNA, 22 bp, Artificial Sequence
  Synthetic oligonucleotide
tgtctctgggaccaatggtact

SEQ ID NO: 533 - DNA, 22 bp, Artificial Sequence
  Synthetic oligonucleotide
tgtctctgggaccaatggtact

SEQ ID NO: 534 - DNA, 22 bp, Artificial Sequence
  Synthetic oligonucleotide
tgtctctgggaccaatggtact

SEQ ID NO: 535 - DNA, 28 bp, Artificial Sequence
  Synthetic oligonucleotide
tgttacttggttccatgctatacatgtc

SEQ ID NO: 536 - DNA, 28 bp, Artificial Sequence
  Synthetic oligonucleotide
tgttacttggttccatgctatacatgtc

SEQ ID NO: 537 - DNA, 28 bp, Artificial Sequence
  Synthetic oligonucleotide
tgttacttggttccatgctatacatgtc

SEQ ID NO: 538 - DNA, 30 bp, Artificial Sequence
  Synthetic oligonucleotide
ggtgttgaaggttttaattgttactttcct

SEQ ID NO: 539 - DNA, 24 bp, Artificial Sequence
  Synthetic oligonucleotide
tctctgggaccaatggtactaaga

SEQ ID NO: 540 - DNA, 24 bp, Artificial Sequence
  Synthetic oligonucleotide
tctctgggaccaatggtactaaga

SEQ ID NO: 541 - DNA, 24 bp, Artificial Sequence
  Synthetic oligonucleotide
aagactcactttcttccacagcaa

SEQ ID NO: 542 - DNA, 24 bp, Artificial Sequence
  Synthetic oligonucleotide
aagactcactttcttccacagcaa

SEQ ID NO: 543 - DNA, 26 bp, Artificial Sequence
  Synthetic oligonucleotide
ggctttagaaccattggtagatttgc

SEQ ID NO: 544 - DNA, 26 bp, Artificial Sequence
  Synthetic oligonucleotide
gccaataggtattaacatcactaggt

SEQ ID NO: 545 - DNA, 31 bp, Artificial Sequence
  Synthetic oligonucleotide
tttgccaataggtattaacatcactaggttt

SEQ ID NO: 546 - DNA, 31 bp, Artificial Sequence; identical to SEQ ID NO: 545
  Synthetic oligonucleotide

SEQ ID NO: 547 - DNA, 31 bp, Artificial Sequence
  Synthetic oligonucleotide
atttgccaataggtattaacatcactaggtt

SEQ ID NO: 548 - DNA, 31 bp, Artificial Sequence; identical to SEQ ID NO: 545
  Synthetic oligonucleotide

SEQ ID NO: 549 - DNA, 31 bp, Artificial Sequence; identical to SEQ ID NO: 547
  Synthetic oligonucleotide

SEQ ID NO: 550 - DNA, 31 bp, Artificial Sequence; identical to SEQ ID NO: 547
  Synthetic oligonucleotide

SEQ ID NO: 551 - DNA, 31 bp, Artificial Sequence; identical to SEQ ID NO: 545
  Synthetic oligonucleotide

SEQ ID NO: 552 - DNA, 31 bp, Artificial Sequence; identical to SEQ ID NO: 545
  Synthetic oligonucleotide

SEQ ID NO: 553 - DNA, 31 bp, Artificial Sequence; identical to SEQ ID NO: 547
  Synthetic oligonucleotide

SEQ ID NO: 554 - DNA, 31 bp, Artificial Sequence; identical to SEQ ID NO: 545
  Synthetic oligonucleotide

SEQ ID NO: 555 - DNA, 31 bp, Artificial Sequence; identical to SEQ ID NO: 547
  Synthetic oligonucleotide

SEQ ID NO: 556 - DNA, 31 bp, Artificial Sequence; identical to SEQ ID NO: 545
  Synthetic oligonucleotide

SEQ ID NO: 557 - DNA, 31 bp, Artificial Sequence; identical to SEQ ID NO: 547
  Synthetic oligonucleotide

SEQ ID NO: 558 - DNA, 31 bp, Artificial Sequence; identical to SEQ ID NO: 545
  Synthetic oligonucleotide

SEQ ID NO: 559 - DNA, 31 bp, Artificial Sequence; identical to SEQ ID NO: 547
  Synthetic oligonucleotide

SEQ ID NO: 560 - DNA, 27 bp, Artificial Sequence
  Synthetic oligonucleotide
aggacttgttcttacctttcttttcca

SEQ ID NO: 561 - DNA, 27 bp, Artificial Sequence
  Synthetic oligonucleotide
aggacttgttcttacctttcttttcca

SEQ ID NO: 562 - DNA, 27 bp, Artificial Sequence
  Synthetic oligonucleotide
aggacttgttcttacctttcttttcca

SEQ ID NO: 563 - DNA, 31 bp, Artificial Sequence; identical to SEQ ID NO: 545
  Synthetic oligonucleotide

SEQ ID NO: 564 - DNA, 34 bp, Artificial Sequence
  Synthetic oligonucleotide
aagtctgtgaatttcaattttgtaatgatccatt

SEQ ID NO: 565 - DNA, 36 bp, Artificial Sequence; identical to SEQ ID NO: 402
  Synthetic oligonucleotide

SEQ ID NO: 566 - DNA, 18 bp, Artificial Sequence
  Synthetic oligonucleotide
gccggtagcacaccttgt

SEQ ID NO: 567 - DNA, 22 bp, Artificial Sequence
  Synthetic oligonucleotide
gaaatctatcaggccggtagca

SEQ ID NO: 568 - DNA, 22 bp, Artificial Sequence
  Synthetic oligonucleotide
gaaatctatcaggccggtagca

SEQ ID NO: 569 - DNA, 22 bp, Artificial Sequence
  Synthetic oligonucleotide
gaaatctatcaggccggtagca

SEQ ID NO: 570 - DNA, 22 bp, Artificial Sequence
  Synthetic oligonucleotide
gaaatctatcaggccggtagca

SEQ ID NO: 571 - DNA, 22 bp, Artificial Sequence
  Synthetic oligonucleotide
gaaatctatcaggccggtagca

SEQ ID NO: 572 - DNA, 22 bp, Artificial Sequence
  Synthetic oligonucleotide
gaaatctatcaggccggtagca

SEQ ID NO: 573 - DNA, 22 bp, Artificial Sequence
  Synthetic oligonucleotide
gaaatctatcaggccggtagca

SEQ ID NO: 574 - DNA, 22 bp, Artificial Sequence
  Synthetic oligonucleotide
gaaatctatcaggccggtagca

SEQ ID NO: 575 - DNA, 19 bp, Artificial Sequence
  Synthetic oligonucleotide
gccggtagcacaccttgta

SEQ ID NO: 576 - DNA, 19 bp, Artificial Sequence
  Synthetic oligonucleotide
gccggtagcacaccttgta

SEQ ID NO: 577 - DNA, 19 bp, Artificial Sequence
  Synthetic oligonucleotide
gccggtagcacaccttgta

SEQ ID NO: 578 - DNA, 19 bp, Artificial Sequence
  Synthetic oligonucleotide
gccggtagcacaccttgta

SEQ ID NO: 579 - DNA, 19 bp, Artificial Sequence
  Synthetic oligonucleotide
gccggtagcacaccttgta

SEQ ID NO: 580 - DNA, 19 bp, Artificial Sequence
  Synthetic oligonucleotide
gccggtagcacaccttgta

SEQ ID NO: 581 - DNA, 18 bp, Artificial Sequence
  Synthetic oligonucleotide
gccggtagcacaccttgt

SEQ ID NO: 582 - DNA, 19 bp, Artificial Sequence
  Synthetic oligonucleotide
gccggtagcacaccttgta

SEQ ID NO: 583 - DNA, 19 bp, Artificial Sequence
  Synthetic oligonucleotide
gccggtagcacaccttgta

SEQ ID NO: 584 - DNA, 18 bp, Artificial Sequence
  Synthetic oligonucleotide
gccggtagcacaccttgt

SEQ ID NO: 585 - DNA, 18 bp, Artificial Sequence
  Synthetic oligonucleotide
gccggtagcacaccttgt

SEQ ID NO: 586 - DNA, 18 bp, Artificial Sequence
  Synthetic oligonucleotide
gccggtagcacaccttgt

SEQ ID NO: 587 - DNA, 18 bp, Artificial Sequence
  Synthetic oligonucleotide
gccggtagcacaccttgt

SEQ ID NO: 588 - DNA, 18 bp, Artificial Sequence
  Synthetic oligonucleotide
gccggtagcacaccttgt

SEQ ID NO: 589 - DNA, 18 bp, Artificial Sequence
  Synthetic oligonucleotide
gccggtagcacaccttgt

SEQ ID NO: 590 - DNA, 18 bp, Artificial Sequence
  Synthetic oligonucleotide
gccggtagcacaccttgt

SEQ ID NO: 591 - DNA, 17 bp, Artificial Sequence
  Synthetic oligonucleotide
ggccggtagcacacctt

SEQ ID NO: 592 - DNA, 17 bp, Artificial Sequence
  Synthetic oligonucleotide
ggccggtagcacacctt

SEQ ID NO: 593 - DNA, 17 bp, Artificial Sequence
  Synthetic oligonucleotide
ggccggtagcacacctt

SEQ ID NO: 594 - DNA, 17 bp, Artificial Sequence
  Synthetic oligonucleotide
ggccggtagcacacctt

SEQ ID NO: 595 - DNA, 17 bp, Artificial Sequence
  Synthetic oligonucleotide
ggccggtagcacacctt

SEQ ID NO: 596 - DNA, 19 bp, Artificial Sequence
  Synthetic oligonucleotide
gccggtagcacaccttgta

SEQ ID NO: 597 - DNA, 18 bp, Artificial Sequence
  Synthetic oligonucleotide
gccggtagcacaccttgt

SEQ ID NO: 598 - DNA, 20 bp, Artificial Sequence
  Synthetic oligonucleotide
ctgatgctgtccgtgatcca

SEQ ID NO: 599 - DNA, 18 bp, Artificial Sequence
  Synthetic oligonucleotide
gatgctgtccgtgatcca

SEQ ID NO: 600 - DNA, 20 bp, Artificial Sequence
  Synthetic oligonucleotide
ctgatgctgtccgtgatcca

SEQ ID NO: 601 - DNA, 18 bp, Artificial Sequence
  Synthetic oligonucleotide
gatgctgtccgtgatcca

SEQ ID NO: 602 - DNA, 20 bp, Artificial Sequence
  Synthetic oligonucleotide
ctgatgctgtccgtgatcca

SEQ ID NO: 603 - DNA, 18 bp, Artificial Sequence
  Synthetic oligonucleotide
gatgctgtccgtgatcca

SEQ ID NO: 604 - DNA, 20 bp, Artificial Sequence
  Synthetic oligonucleotide
ctgatgctgtccgtgatcca

SEQ ID NO: 605 - DNA, 18 bp, Artificial Sequence
  Synthetic oligonucleotide
gatgctgtccgtgatcca

SEQ ID NO: 606 - DNA, 31 bp, Artificial Sequence
  Synthetic oligonucleotide
acgctactaatgttgttattaaagtctgtga

SEQ ID NO: 607 - DNA, 29 bp, Artificial Sequence
  Synthetic oligonucleotide
gatccatttttgggtgtttattaccacaa

SEQ ID NO: 608 - DNA, 29 bp, Artificial Sequence
  Synthetic oligonucleotide
gatccatttttgggtgtttattaccacaa

SEQ ID NO: 609 - DNA, 26 bp, Artificial Sequence
  Synthetic oligonucleotide
gctgagagacatattcaaaagtgcaa

SEQ ID NO: 610 - DNA, 26 bp, Artificial Sequence
  Synthetic oligonucleotide
gctgagagacatattcaaaagtgcaa

SEQ ID NO: 611 - DNA, 27 bp, Artificial Sequence
  Synthetic oligonucleotide
ccacaaaaacaacaaaagttggatgga

SEQ ID NO: 612 - DNA, 27 bp, Artificial Sequence
  Synthetic oligonucleotide
ccacaaaaacaacaaaagttggatgga

SEQ ID NO: 613 - DNA, 24 bp, Artificial Sequence
  Synthetic oligonucleotide
caactgaaatctatcaggccggta

SEQ ID NO: 614 - DNA, 26 bp, Artificial Sequence
  Synthetic oligonucleotide
caaatggtatttgtaatgcagcacct

SEQ ID NO: 615 - DNA, 26 bp, Artificial Sequence
  Synthetic oligonucleotide
aaatggtatttgtaatgcagcacctg

SEQ ID NO: 616 - DNA, 31 bp, Artificial Sequence
  Synthetic oligonucleotide
ccaaccaacagaatctattgttagatttcct

SEQ ID NO: 617 - DNA, 25 bp, Artificial Sequence
  Synthetic oligonucleotide
ggctgcgttatagcttggaattcta

SEQ ID NO: 618 - DNA, 28 bp, Artificial Sequence
  Synthetic oligonucleotide
caatcttttgttgcaatatggcagtttt

SEQ ID NO: 619 - DNA, 27 bp, Artificial Sequence
  Synthetic oligonucleotide
caatcttttgttgcaatatggcagttt

SEQ ID NO: 620 - DNA, 27 bp, Artificial Sequence
  Synthetic oligonucleotide
aggacttgttcttacctttcttttcca

SEQ ID NO: 621 - DNA, 27 bp, Artificial Sequence
  Synthetic oligonucleotide
aggacttgttcttacctttcttttcca

SEQ ID NO: 622 - DNA, 27 bp, Artificial Sequence
  Synthetic oligonucleotide
aggacttgttcttacctttcttttcca

SEQ ID NO: 623 - DNA, 27 bp, Artificial Sequence
  Synthetic oligonucleotide
aggacttgttcttacctttcttttcca

SEQ ID NO: 624 - DNA, 31 bp, Artificial Sequence
  Synthetic oligonucleotide
acacaaaggaatttttatgaaccacaaatca

SEQ ID NO: 625 - DNA, 28 bp, Artificial Sequence
  Synthetic oligonucleotide
attagaggtgatgaagtcagacaaatcg

SEQ ID NO: 626 - DNA, 19 bp, Artificial Sequence
  Synthetic oligonucleotide
acaaatcgctccagggcaa

SEQ ID NO: 627 - DNA, 19 bp, Artificial Sequence
  Synthetic oligonucleotide
acaaatcgctccagggcaa

SEQ ID NO: 628 - DNA, 19 bp, Artificial Sequence
  Synthetic oligonucleotide
acaaatcgctccagggcaa

SEQ ID NO: 629 - DNA, 19 bp, Artificial Sequence
  Synthetic oligonucleotide
acaaatcgctccagggcaa

SEQ ID NO: 630 - DNA, 19 bp, Artificial Sequence
  Synthetic oligonucleotide
acaaatcgctccagggcaa

SEQ ID NO: 631 - DNA, 19 bp, Artificial Sequence
  Synthetic oligonucleotide
acaaatcgctccagggcaa

SEQ ID NO: 632 - DNA, 19 bp, Artificial Sequence
  Synthetic oligonucleotide
acaaatcgctccagggcaa

SEQ ID NO: 633 - DNA, 19 bp, Artificial Sequence
  Synthetic oligonucleotide
acaaatcgctccagggcaa

SEQ ID NO: 634 - DNA, 19 bp, Artificial Sequence
  Synthetic oligonucleotide
acaaatcgctccagggcaa

SEQ ID NO: 635 - DNA, 19 bp, Artificial Sequence
  Synthetic oligonucleotide
acaaatcgctccagggcaa

SEQ ID NO: 636 - DNA, 23 bp, Artificial Sequence
  Synthetic oligonucleotide
atgaagtcagacaaatcgctcca

SEQ ID NO: 637 - DNA, 23 bp, Artificial Sequence
  Synthetic oligonucleotide
atgaagtcagacaaatcgctcca

SEQ ID NO: 638 - DNA, 23 bp, Artificial Sequence
  Synthetic oligonucleotide
atgaagtcagacaaatcgctcca

SEQ ID NO: 639 - DNA, 23 bp, Artificial Sequence
  Synthetic oligonucleotide
atgaagtcagacaaatcgctcca

SEQ ID NO: 640 - DNA, 23 bp, Artificial Sequence
  Synthetic oligonucleotide
atgaagtcagacaaatcgctcca

SEQ ID NO: 641 - DNA, 23 bp, Artificial Sequence
  Synthetic oligonucleotide
atgaagtcagacaaatcgctcca

SEQ ID NO: 642 - DNA, 23 bp, Artificial Sequence
  Synthetic oligonucleotide
atgaagtcagacaaatcgctcca

SEQ ID NO: 643 - DNA, 23 bp, Artificial Sequence
  Synthetic oligonucleotide
atgaagtcagacaaatcgctcca

SEQ ID NO: 644 - DNA, 23 bp, Artificial Sequence
  Synthetic oligonucleotide
atgaagtcagacaaatcgctcca

SEQ ID NO: 645 - DNA, 23 bp, Artificial Sequence
  Synthetic oligonucleotide
atgaagtcagacaaatcgctcca

SEQ ID NO: 646 - DNA, 28 bp, Artificial Sequence
  Synthetic oligonucleotide
attagaggtgatgaagtcagacaaatcg

SEQ ID NO: 647 - DNA, 28 bp, Artificial Sequence
  Synthetic oligonucleotide
attagaggtgatgaagtcagacaaatcg

SEQ ID NO: 648 - DNA, 28 bp, Artificial Sequence
  Synthetic oligonucleotide
attagaggtgatgaagtcagacaaatcg

SEQ ID NO: 649 - DNA, 28 bp, Artificial Sequence
  Synthetic oligonucleotide
attagaggtgatgaagtcagacaaatcg

SEQ ID NO: 650 - DNA, 28 bp, Artificial Sequence
  Synthetic oligonucleotide
attagaggtgatgaagtcagacaaatcg

SEQ ID NO: 651 - DNA, 28 bp, Artificial Sequence
  Synthetic oligonucleotide
attagaggtgatgaagtcagacaaatcg

SEQ ID NO: 652 - DNA, 28 bp, Artificial Sequence
  Synthetic oligonucleotide
attagaggtgatgaagtcagacaaatcg

SEQ ID NO: 653 - DNA, 28 bp, Artificial Sequence
  Synthetic oligonucleotide
attagaggtgatgaagtcagacaaatcg

SEQ ID NO: 654 - DNA, 28 bp, Artificial Sequence
  Synthetic oligonucleotide
attagaggtgatgaagtcagacaaatcg

SEQ ID NO: 655 - DNA, 28 bp, Artificial Sequence
  Synthetic oligonucleotide
attagaggtgatgaagtcagacaaatcg

SEQ ID NO: 656 - DNA, 23 bp, Artificial Sequence
  Synthetic oligonucleotide
ggtgatgaagtcagacaaatcgc

SEQ ID NO: 657 - DNA, 23 bp, Artificial Sequence
  Synthetic oligonucleotide
ggtgatgaagtcagacaaatcgc

SEQ ID NO: 658 - DNA, 23 bp, Artificial Sequence
  Synthetic oligonucleotide
ggtgatgaagtcagacaaatcgc

SEQ ID NO: 659 - DNA, 23 bp, Artificial Sequence
  Synthetic oligonucleotide
ggtgatgaagtcagacaaatcgc

SEQ ID NO: 660 - DNA, 23 bp, Artificial Sequence
  Synthetic oligonucleotide
ggtgatgaagtcagacaaatcgc

SEQ ID NO: 661 - DNA, 23 bp, Artificial Sequence
  Synthetic oligonucleotide
ggtgatgaagtcagacaaatcgc

SEQ ID NO: 662 - DNA, 23 bp, Artificial Sequence
  Synthetic oligonucleotide
ggtgatgaagtcagacaaatcgc

SEQ ID NO: 663 - DNA, 23 bp, Artificial Sequence
  Synthetic oligonucleotide
ggtgatgaagtcagacaaatcgc

SEQ ID NO: 664 - DNA, 23 bp, Artificial Sequence
  Synthetic oligonucleotide
ggtgatgaagtcagacaaatcgc

SEQ ID NO: 665 - DNA, 23 bp, Artificial Sequence
  Synthetic oligonucleotide
ggtgatgaagtcagacaaatcgc

SEQ ID NO: 666 - DNA, 24 bp, Artificial Sequence
  Synthetic oligonucleotide
ggtgatgaagtcagacaaatcgct

SEQ ID NO: 667 - DNA, 24 bp, Artificial Sequence
  Synthetic oligonucleotide
ggtgatgaagtcagacaaatcgct

SEQ ID NO: 668 - DNA, 24 bp, Artificial Sequence
  Synthetic oligonucleotide
ggtgatgaagtcagacaaatcgct

SEQ ID NO: 669 - DNA, 24 bp, Artificial Sequence
  Synthetic oligonucleotide
ggtgatgaagtcagacaaatcgct

SEQ ID NO: 670 - DNA, 24 bp, Artificial Sequence
  Synthetic oligonucleotide
ggtgatgaagtcagacaaatcgct

SEQ ID NO: 671 - DNA, 24 bp, Artificial Sequence
  Synthetic oligonucleotide
ggtgatgaagtcagacaaatcgct

SEQ ID NO: 672 - DNA, 24 bp, Artificial Sequence
  Synthetic oligonucleotide
ggtgatgaagtcagacaaatcgct

SEQ ID NO: 673 - DNA, 24 bp, Artificial Sequence
  Synthetic oligonucleotide
ggtgatgaagtcagacaaatcgct

SEQ ID NO: 674 - DNA, 24 bp, Artificial Sequence
  Synthetic oligonucleotide
ggtgatgaagtcagacaaatcgct

SEQ ID NO: 675 - DNA, 24 bp, Artificial Sequence
  Synthetic oligonucleotide
ggtgatgaagtcagacaaatcgct

SEQ ID NO: 676 - DNA, 23 bp, Artificial Sequence
  Synthetic oligonucleotide
tgaagtcagacaaatcgctccag

SEQ ID NO: 677 - DNA, 23 bp, Artificial Sequence
  Synthetic oligonucleotide
tgaagtcagacaaatcgctccag

SEQ ID NO: 678 - DNA, 23 bp, Artificial Sequence
  Synthetic oligonucleotide
tgaagtcagacaaatcgctccag

SEQ ID NO: 679 - DNA, 23 bp, Artificial Sequence
  Synthetic oligonucleotide
tgaagtcagacaaatcgctccag

SEQ ID NO: 680 - DNA, 23 bp, Artificial Sequence
  Synthetic oligonucleotide
tgaagtcagacaaatcgctccag

SEQ ID NO: 681 - DNA, 23 bp, Artificial Sequence
  Synthetic oligonucleotide
tgaagtcagacaaatcgctccag

SEQ ID NO: 682 - DNA, 23 bp, Artificial Sequence
  Synthetic oligonucleotide
tgaagtcagacaaatcgctccag

SEQ ID NO: 683 - DNA, 23 bp, Artificial Sequence
  Synthetic oligonucleotide
tgaagtcagacaaatcgctccag

SEQ ID NO: 684 - DNA, 23 bp, Artificial Sequence
  Synthetic oligonucleotide
tgaagtcagacaaatcgctccag

SEQ ID NO: 685 - DNA, 31 bp, Artificial Sequence
  Synthetic oligonucleotide
tgtaattagaggtgatgaagtcagacaaatc

SEQ ID NO: 686 - DNA, 31 bp, Artificial Sequence; identical to SEQ ID NO: 685
  Synthetic oligonucleotide

SEQ ID NO: 687 - DNA, 31 bp, Artificial Sequence; identical to SEQ ID NO: 685
  Synthetic oligonucleotide

SEQ ID NO: 688 - DNA, 31 bp, Artificial Sequence; identical to SEQ ID NO: 685
  Synthetic oligonucleotide

SEQ ID NO: 689 - DNA, 31 bp, Artificial Sequence; identical to SEQ ID NO: 685
  Synthetic oligonucleotide

SEQ ID NO: 690 - DNA, 31 bp, Artificial Sequence; identical to SEQ ID NO: 685
  Synthetic oligonucleotide

SEQ ID NO: 691 - DNA, 31 bp, Artificial Sequence; identical to SEQ ID NO: 685
  Synthetic oligonucleotide

SEQ ID NO: 692 - DNA, 31 bp, Artificial Sequence; identical to SEQ ID NO: 685
  Synthetic oligonucleotide

SEQ ID NO: 693 - DNA, 28 bp, Artificial Sequence
  Synthetic oligonucleotide
attagaggtgatgaagtcagacaaatcg

SEQ ID NO: 694 - DNA, 23 bp, Artificial Sequence
  Synthetic oligonucleotide
atgaagtcagacaaatcgctcca

SEQ ID NO: 695 - DNA, 23 bp, Artificial Sequence
  Synthetic oligonucleotide
atgaagtcagacaaatcgctcca

SEQ ID NO: 696 - DNA, 23 bp, Artificial Sequence
  Synthetic oligonucleotide
atgaagtcagacaaatcgctcca

SEQ ID NO: 697 - DNA, 23 bp, Artificial Sequence
  Synthetic oligonucleotide
atgaagtcagacaaatcgctcca

SEQ ID NO: 698 - DNA, 23 bp, Artificial Sequence
  Synthetic oligonucleotide
atgaagtcagacaaatcgctcca

SEQ ID NO: 699 - DNA, 23 bp, Artificial Sequence
  Synthetic oligonucleotide
atgaagtcagacaaatcgctcca

SEQ ID NO: 700 - DNA, 23 bp, Artificial Sequence
  Synthetic oligonucleotide
atgaagtcagacaaatcgctcca

SEQ ID NO: 701 - DNA, 23 bp, Artificial Sequence
  Synthetic oligonucleotide
atgaagtcagacaaatcgctcca

SEQ ID NO: 702 - DNA, 23 bp, Artificial Sequence
  Synthetic oligonucleotide
atgaagtcagacaaatcgctcca

SEQ ID NO: 703 - DNA, 23 bp, Artificial Sequence
  Synthetic oligonucleotide
atgaagtcagacaaatcgctcca

SEQ ID NO: 704 - DNA, 28 bp, Artificial Sequence
  Synthetic oligonucleotide
attagaggtgatgaagtcagacaaatcg

SEQ ID NO: 705 - DNA, 28 bp, Artificial Sequence
  Synthetic oligonucleotide
attagaggtgatgaagtcagacaaatcg

SEQ ID NO: 706 - DNA, 28 bp, Artificial Sequence
  Synthetic oligonucleotide
attagaggtgatgaagtcagacaaatcg

SEQ ID NO: 707 - DNA, 28 bp, Artificial Sequence
  Synthetic oligonucleotide
attagaggtgatgaagtcagacaaatcg

SEQ ID NO: 708 - DNA, 28 bp, Artificial Sequence
  Synthetic oligonucleotide
attagaggtgatgaagtcagacaaatcg

SEQ ID NO: 709 - DNA, 28 bp, Artificial Sequence
  Synthetic oligonucleotide
attagaggtgatgaagtcagacaaatcg

SEQ ID NO: 710 - DNA, 28 bp, Artificial Sequence
  Synthetic oligonucleotide
attagaggtgatgaagtcagacaaatcg

SEQ ID NO: 711 - DNA, 28 bp, Artificial Sequence
  Synthetic oligonucleotide
attagaggtgatgaagtcagacaaatcg

SEQ ID NO: 712 - DNA, 28 bp, Artificial Sequence
  Synthetic oligonucleotide
attagaggtgatgaagtcagacaaatcg

SEQ ID NO: 713 - DNA, 28 bp, Artificial Sequence
  Synthetic oligonucleotide
attagaggtgatgaagtcagacaaatcg

SEQ ID NO: 714 - DNA, 23 bp, Artificial Sequence
  Synthetic oligonucleotide
ggtgatgaagtcagacaaatcgc

SEQ ID NO: 715 - DNA, 23 bp, Artificial Sequence
  Synthetic oligonucleotide
ggtgatgaagtcagacaaatcgc

SEQ ID NO: 716 - DNA, 23 bp, Artificial Sequence
  Synthetic oligonucleotide
ggtgatgaagtcagacaaatcgc

SEQ ID NO: 717 - DNA, 23 bp, Artificial Sequence
  Synthetic oligonucleotide
ggtgatgaagtcagacaaatcgc

SEQ ID NO: 718 - DNA, 23 bp, Artificial Sequence
  Synthetic oligonucleotide
ggtgatgaagtcagacaaatcgc

SEQ ID NO: 719 - DNA, 23 bp, Artificial Sequence
  Synthetic oligonucleotide
ggtgatgaagtcagacaaatcgc

SEQ ID NO: 720 - DNA, 23 bp, Artificial Sequence
  Synthetic oligonucleotide
ggtgatgaagtcagacaaatcgc

SEQ ID NO: 721 - DNA, 23 bp, Artificial Sequence
  Synthetic oligonucleotide
ggtgatgaagtcagacaaatcgc

SEQ ID NO: 722 - DNA, 23 bp, Artificial Sequence
  Synthetic oligonucleotide
ggtgatgaagtcagacaaatcgc

SEQ ID NO: 723 - DNA, 23 bp, Artificial Sequence
  Synthetic oligonucleotide
ggtgatgaagtcagacaaatcgc

SEQ ID NO: 724 - DNA, 24 bp, Artificial Sequence
  Synthetic oligonucleotide
ggtgatgaagtcagacaaatcgct

SEQ ID NO: 725 - DNA, 24 bp, Artificial Sequence
  Synthetic oligonucleotide
ggtgatgaagtcagacaaatcgct

SEQ ID NO: 726 - DNA, 24 bp, Artificial Sequence
  Synthetic oligonucleotide
ggtgatgaagtcagacaaatcgct

SEQ ID NO: 727 - DNA, 24 bp, Artificial Sequence
  Synthetic oligonucleotide
ggtgatgaagtcagacaaatcgct

SEQ ID NO: 728 - DNA, 24 bp, Artificial Sequence
  Synthetic oligonucleotide
ggtgatgaagtcagacaaatcgct

SEQ ID NO: 729 - DNA, 24 bp, Artificial Sequence
  Synthetic oligonucleotide
ggtgatgaagtcagacaaatcgct

SEQ ID NO: 730 - DNA, 24 bp, Artificial Sequence
  Synthetic oligonucleotide
ggtgatgaagtcagacaaatcgct

SEQ ID NO: 731 - DNA, 24 bp, Artificial Sequence
  Synthetic oligonucleotide
ggtgatgaagtcagacaaatcgct

SEQ ID NO: 732 - DNA, 24 bp, Artificial Sequence
  Synthetic oligonucleotide
ggtgatgaagtcagacaaatcgct

SEQ ID NO: 733 - DNA, 24 bp, Artificial Sequence
  Synthetic oligonucleotide
ggtgatgaagtcagacaaatcgct

SEQ ID NO: 734 - DNA, 23 bp, Artificial Sequence
  Synthetic oligonucleotide
tgaagtcagacaaatcgctccag

SEQ ID NO: 735 - DNA, 23 bp, Artificial Sequence
  Synthetic oligonucleotide
tgaagtcagacaaatcgctccag

SEQ ID NO: 736 - DNA, 23 bp, Artificial Sequence
  Synthetic oligonucleotide
tgaagtcagacaaatcgctccag

SEQ ID NO: 737 - DNA, 23 bp, Artificial Sequence
  Synthetic oligonucleotide
tgaagtcagacaaatcgctccag

SEQ ID NO: 738 - DNA, 23 bp, Artificial Sequence
  Synthetic oligonucleotide
tgaagtcagacaaatcgctccag

SEQ ID NO: 739 - DNA, 23 bp, Artificial Sequence
  Synthetic oligonucleotide
tgaagtcagacaaatcgctccag

SEQ ID NO: 740 - DNA, 23 bp, Artificial Sequence
  Synthetic oligonucleotide
tgaagtcagacaaatcgctccag

SEQ ID NO: 741 - DNA, 23 bp, Artificial Sequence
  Synthetic oligonucleotide
tgaagtcagacaaatcgctccag

SEQ ID NO: 742 - DNA, 23 bp, Artificial Sequence
  Synthetic oligonucleotide
tgaagtcagacaaatcgctccag

SEQ ID NO: 743 - DNA, 31 bp, Artificial Sequence; identical to SEQ ID NO: 685
  Synthetic oligonucleotide

SEQ ID NO: 744 - DNA, 31 bp, Artificial Sequence; identical to SEQ ID NO: 685
  Synthetic oligonucleotide

SEQ ID NO: 745 - DNA, 31 bp, Artificial Sequence; identical to SEQ ID NO: 685
  Synthetic oligonucleotide

SEQ ID NO: 746 - DNA, 31 bp, Artificial Sequence; identical to SEQ ID NO: 685
  Synthetic oligonucleotide

SEQ ID NO: 747 - DNA, 31 bp, Artificial Sequence; identical to SEQ ID NO: 685
  Synthetic oligonucleotide

SEQ ID NO: 748 - DNA, 31 bp, Artificial Sequence; identical to SEQ ID NO: 685
  Synthetic oligonucleotide

SEQ ID NO: 749 - DNA, 31 bp, Artificial Sequence; identical to SEQ ID NO: 685
  Synthetic oligonucleotide

SEQ ID NO: 750 - DNA, 31 bp, Artificial Sequence; identical to SEQ ID NO: 685
  Synthetic oligonucleotide

SEQ ID NO: 751 - DNA, 28 bp, Artificial Sequence
  Synthetic oligonucleotide
attagaggtgatgaagtcagacaaatcg

SEQ ID NO: 752 - DNA, 25 bp, Artificial Sequence
  Synthetic oligonucleotide
ggctgcgttatagcttggaattcta

SEQ ID NO: 753 - DNA, 30 bp, Artificial Sequence
  Synthetic oligonucleotide
gtttttcttgttttattgccactagtctct

SEQ ID NO: 754 - DNA, 24 bp, Artificial Sequence
  Synthetic oligonucleotide
ttgccactagtctctagtcagtgt

SEQ ID NO: 755 - DNA, 24 bp, Artificial Sequence
  Synthetic oligonucleotide
ttgccactagtctctagtcagtgt

SEQ ID NO: 756 - DNA, 24 bp, Artificial Sequence
  Synthetic oligonucleotide
ttgccactagtctctagtcagtgt

SEQ ID NO: 757 - DNA, 30 bp, Artificial Sequence; identical to SEQ ID NO: 407
  Synthetic oligonucleotide

SEQ ID NO: 758 - DNA, 30 bp, Artificial Sequence; identical to SEQ ID NO: 407
  Synthetic oligonucleotide

SEQ ID NO: 759 - DNA, 26 bp, Artificial Sequence
  Synthetic oligonucleotide
gccaataggtattaacatcactaggt

SEQ ID NO: 760 - DNA, 31 bp, Artificial Sequence; identical to SEQ ID NO: 547
  Synthetic oligonucleotide

SEQ ID NO: 761 - DNA, 31 bp, Artificial Sequence; identical to SEQ ID NO: 547
  Synthetic oligonucleotide

SEQ ID NO: 762 - DNA, 31 bp, Artificial Sequence; identical to SEQ ID NO: 547
  Synthetic oligonucleotide

SEQ ID NO: 763 - DNA, 31 bp, Artificial Sequence; identical to SEQ ID NO: 547
  Synthetic oligonucleotide

SEQ ID NO: 764 - DNA, 31 bp, Artificial Sequence
  Synthetic oligonucleotide
gccaataggtattaacatcactaggtttcaa

SEQ ID NO: 765 - DNA, 31 bp, Artificial Sequence; identical to SEQ ID NO: 764
  Synthetic oligonucleotide

SEQ ID NO: 766 - DNA, 31 bp, Artificial Sequence; identical to SEQ ID NO: 764
  Synthetic oligonucleotide

SEQ ID NO: 767 - DNA, 31 bp, Artificial Sequence; identical to SEQ ID NO: 764
  Synthetic oligonucleotide

SEQ ID NO: 768 - DNA, 30 bp, Artificial Sequence; identical to SEQ ID NO: 407
  Synthetic oligonucleotide

SEQ ID NO: 769 - DNA, 30 bp, Artificial Sequence; identical to SEQ ID NO: 407
  Synthetic oligonucleotide

SEQ ID NO: 770 - DNA, 30 bp, Artificial Sequence; identical to SEQ ID NO: 407
  Synthetic oligonucleotide

SEQ ID NO: 771 - DNA, 30 bp, Artificial Sequence; identical to SEQ ID NO: 407
  Synthetic oligonucleotide

SEQ ID NO: 772 - DNA, 30 bp, Artificial Sequence; identical to SEQ ID NO: 407
  Synthetic oligonucleotide

SEQ ID NO: 773 - DNA, 30 bp, Artificial Sequence
  Synthetic oligonucleotide
tgccaataggtattaacatcactaggtttc

SEQ ID NO: 774 - DNA, 30 bp, Artificial Sequence; identical to SEQ ID NO: 773
  Synthetic oligonucleotide

SEQ ID NO: 775 - DNA, 30 bp, Artificial Sequence; identical to SEQ ID NO: 773
  Synthetic oligonucleotide

SEQ ID NO: 776 - DNA, 30 bp, Artificial Sequence; identical to SEQ ID NO: 773
  Synthetic oligonucleotide

SEQ ID NO: 777 - DNA, 30 bp, Artificial Sequence; identical to SEQ ID NO: 773
  Synthetic oligonucleotide

SEQ ID NO: 778 - DNA, 31 bp, Artificial Sequence; identical to SEQ ID NO: 545
  Synthetic oligonucleotide

SEQ ID NO: 779 - DNA, 31 bp, Artificial Sequence; identical to SEQ ID NO: 545
  Synthetic oligonucleotide

SEQ ID NO: 780 - DNA, 31 bp, Artificial Sequence; identical to SEQ ID NO: 545
  Synthetic oligonucleotide

SEQ ID NO: 781 - DNA, 31 bp, Artificial Sequence; identical to SEQ ID NO: 545
  Synthetic oligonucleotide

SEQ ID NO: 782 - DNA, 30 bp, Artificial Sequence; identical to SEQ ID NO: 412
  Synthetic oligonucleotide

SEQ ID NO: 783 - DNA, 30 bp, Artificial Sequence; identical to SEQ ID NO: 412
  Synthetic oligonucleotide

SEQ ID NO: 784 - DNA, 26 bp, Artificial Sequence
  Synthetic oligonucleotide
ttgatttaggtgacatctctggcatt

SEQ ID NO: 785 - DNA, 25 bp, Artificial Sequence
  Synthetic oligonucleotide
tgattttacaggctgcgttatagct

SEQ ID NO: 786 - DNA, 25 bp, Artificial Sequence
  Synthetic oligonucleotide
tgattttacaggctgcgttatagct

SEQ ID NO: 787 - DNA, 23 bp, Artificial Sequence
  Synthetic oligonucleotide
aggctgcgttatagcttggaatt

SEQ ID NO: 788 - DNA, 24 bp, Artificial Sequence
  Synthetic oligonucleotide
ggctgcgttatagcttggaattct

SEQ ID NO: 789 - DNA, 26 bp, Artificial Sequence
  Synthetic oligonucleotide
caatcttgattctaaggttggtggta

SEQ ID NO: 790 - DNA, 29 bp, Artificial Sequence
  Synthetic oligonucleotide
tgcgttatagcttggaattctaacaatct

SEQ ID NO: 791 - DNA, 26 bp, Artificial Sequence
  Synthetic oligonucleotide
caatcttgattctaaggttggtggta

SEQ ID NO: 792 - DNA, 30 bp, Artificial Sequence; identical to SEQ ID NO: 412
  Synthetic oligonucleotide

SEQ ID NO: 793 - DNA, 25 bp, Artificial Sequence
  Synthetic oligonucleotide
tcttgattctaaggttggtggtaat

SEQ ID NO: 794 - DNA, 30 bp, Artificial Sequence; identical to SEQ ID NO: 412
  Synthetic oligonucleotide

SEQ ID NO: 795 - DNA, 28 bp, Artificial Sequence
  Synthetic oligonucleotide
caaaccttttgagagagatatttcaact

SEQ ID NO: 796 - DNA, 31 bp, Artificial Sequence; identical to SEQ ID NO: 328
  Synthetic oligonucleotide

SEQ ID NO: 797 - DNA, 25 bp, Artificial Sequence
  Synthetic oligonucleotide
tcttgattctaaggttggtggtaat

SEQ ID NO: 798 - DNA, 25 bp, Artificial Sequence
  Synthetic oligonucleotide
tcttgattctaaggttggtggtaat

SEQ ID NO: 799 - DNA, 30 bp, Artificial Sequence; identical to SEQ ID NO: 412
  Synthetic oligonucleotide

SEQ ID NO: 800 - DNA, 30 bp, Artificial Sequence; identical to SEQ ID NO: 412
  Synthetic oligonucleotide

SEQ ID NO: 801 - DNA, 24 bp, Artificial Sequence
  Synthetic oligonucleotide
caactgaaatctatcaggccggta

SEQ ID NO: 802 - DNA, 24 bp, Artificial Sequence
  Synthetic oligonucleotide
caactgaaatctatcaggccggta

SEQ ID NO: 803 - DNA, 30 bp, Artificial Sequence; identical to SEQ ID NO: 538
  Synthetic oligonucleotide

SEQ ID NO: 804 - DNA, 30 bp, Artificial Sequence; identical to SEQ ID NO: 538
  Synthetic oligonucleotide

SEQ ID NO: 805 - DNA, 29 bp, Artificial Sequence
  Synthetic oligonucleotide
gtgttgaaggttttaattgttactttcct

SEQ ID NO: 806 - DNA, 28 bp, Artificial Sequence
  Synthetic oligonucleotide
tgttgaaggttttaattgttactttcct

SEQ ID NO: 807 - DNA, 26 bp, Artificial Sequence
  Synthetic oligonucleotide
ttgaaggttttaattgttactttcct

SEQ ID NO: 808 - DNA, 26 bp, Artificial Sequence
  Synthetic oligonucleotide
ttgaaggttttaattgttactttcct

SEQ ID NO: 809 - DNA, 26 bp, Artificial Sequence
  Synthetic oligonucleotide
ttgaaggttttaattgttactttcct

SEQ ID NO: 810 - DNA, 25 bp, Artificial Sequence
  Synthetic oligonucleotide
acttggcgtgtttattctacaggtt

SEQ ID NO: 811 - DNA, 25 bp, Artificial Sequence
  Synthetic oligonucleotide
gcaggtatatgcgctagttatcaga

SEQ ID NO: 812 - DNA, 24 bp, Artificial Sequence
  Synthetic oligonucleotide
tgcgctagttatcagactcagact

SEQ ID NO: 813 - DNA, 27 bp, Artificial Sequence
  Synthetic oligonucleotide
caatcttttgttgcaatatggcagttt

SEQ ID NO: 814 - DNA, 23 bp, Artificial Sequence
  Synthetic oligonucleotide
tgctgctagagacctcatttgtg

SEQ ID NO: 815 - DNA, 23 bp, Artificial Sequence
  Synthetic oligonucleotide
tgctgctagagacctcatttgtg

SEQ ID NO: 816 - DNA, 27 bp, Artificial Sequence
  Synthetic oligonucleotide
caaccaaaatgcacaagctttaaacac

SEQ ID NO: 817 - DNA, 27 bp, Artificial Sequence
  Synthetic oligonucleotide
caaccaaaatgcacaagctttaaacac

SEQ ID NO: 818 - DNA, 25 bp, Artificial Sequence
  Synthetic oligonucleotide
gccactagtctctagtcagtgtgtt

SEQ ID NO: 819 - DNA, 25 bp, Artificial Sequence
  Synthetic oligonucleotide
gccactagtctctagtcagtgtgtt

SEQ ID NO: 820 - DNA, 24 bp, Artificial Sequence
  Synthetic oligonucleotide
tgcgctagttatcagactcagact

SEQ ID NO: 821 - DNA, 22 bp, Artificial Sequence
  Synthetic oligonucleotide
cgctagttatcagactcagact

SEQ ID NO: 822 - DNA, 22 bp, Artificial Sequence
  Synthetic oligonucleotide
cgctagttatcagactcagact

SEQ ID NO: 823 - DNA, 22 bp, Artificial Sequence
  Synthetic oligonucleotide
cgctagttatcagactcagact

SEQ ID NO: 824 - DNA, 22 bp, Artificial Sequence
  Synthetic oligonucleotide
cgctagttatcagactcagact

SEQ ID NO: 825 - DNA, 27 bp, Artificial Sequence
  Synthetic oligonucleotide
aggtatatgcgctagttatcagactca

SEQ ID NO: 826 - DNA, 27 bp, Artificial Sequence
  Synthetic oligonucleotide
aggtatatgcgctagttatcagactca

SEQ ID NO: 827 - DNA, 27 bp, Artificial Sequence
  Synthetic oligonucleotide
aggtatatgcgctagttatcagactca

SEQ ID NO: 828 - DNA, 27 bp, Artificial Sequence
  Synthetic oligonucleotide
aggtatatgcgctagttatcagactca

SEQ ID NO: 829 - DNA, 27 bp, Artificial Sequence
  Synthetic oligonucleotide
aggtatatgcgctagttatcagactca

SEQ ID NO: 830 - DNA, 27 bp, Artificial Sequence
  Synthetic oligonucleotide
aggtatatgcgctagttatcagactca

SEQ ID NO: 831 - DNA, 27 bp, Artificial Sequence
  Synthetic oligonucleotide
aggtatatgcgctagttatcagactca

SEQ ID NO: 832 - DNA, 27 bp, Artificial Sequence
  Synthetic oligonucleotide
aggtatatgcgctagttatcagactca

SEQ ID NO: 833 - DNA, 22 bp, Artificial Sequence
  Synthetic oligonucleotide
attggtgcaggtatatgcgcta

SEQ ID NO: 834 - DNA, 22 bp, Artificial Sequence
  Synthetic oligonucleotide
attggtgcaggtatatgcgcta

SEQ ID NO: 835 - DNA, 22 bp, Artificial Sequence
  Synthetic oligonucleotide
attggtgcaggtatatgcgcta

SEQ ID NO: 836 - DNA, 26 bp, Artificial Sequence
  Synthetic oligonucleotide
caggtatatgcgctagttatcagact

SEQ ID NO: 837 - DNA, 26 bp, Artificial Sequence
  Synthetic oligonucleotide
caggtatatgcgctagttatcagact

SEQ ID NO: 838 - DNA, 26 bp, Artificial Sequence
  Synthetic oligonucleotide
caggtatatgcgctagttatcagact

SEQ ID NO: 839 - DNA, 26 bp, Artificial Sequence
  Synthetic oligonucleotide
caggtatatgcgctagttatcagact

SEQ ID NO: 840 - DNA, 26 bp, Artificial Sequence
  Synthetic oligonucleotide
caggtatatgcgctagttatcagact

SEQ ID NO: 841 - DNA, 26 bp, Artificial Sequence
  Synthetic oligonucleotide
caggtatatgcgctagttatcagact

SEQ ID NO: 842 - DNA, 26 bp, Artificial Sequence
  Synthetic oligonucleotide
caggtatatgcgctagttatcagact

SEQ ID NO: 843 - DNA, 26 bp, Artificial Sequence
  Synthetic oligonucleotide
caggtatatgcgctagttatcagact

SEQ ID NO: 844 - DNA, 26 bp, Artificial Sequence
  Synthetic oligonucleotide
caggtatatgcgctagttatcagact

SEQ ID NO: 845 - DNA, 26 bp, Artificial Sequence
  Synthetic oligonucleotide
caggtatatgcgctagttatcagact

SEQ ID NO: 846 - DNA, 26 bp, Artificial Sequence
  Synthetic oligonucleotide
caggtatatgcgctagttatcagact

SEQ ID NO: 847 - DNA, 25 bp, Artificial Sequence
  Synthetic oligonucleotide
gcaggtatatgcgctagttatcaga

SEQ ID NO: 848 - DNA, 25 bp, Artificial Sequence
  Synthetic oligonucleotide
gcaggtatatgcgctagttatcaga

SEQ ID NO: 849 - DNA, 26 bp, Artificial Sequence
  Synthetic oligonucleotide
gcaggtatatgcgctagttatcagac

SEQ ID NO: 850 - DNA, 25 bp, Artificial Sequence
  Synthetic oligonucleotide
gcaggtatatgcgctagttatcaga

SEQ ID NO: 851 - DNA, 25 bp, Artificial Sequence
  Synthetic oligonucleotide
gcaggtatatgcgctagttatcaga

SEQ ID NO: 852 - DNA, 25 bp, Artificial Sequence
  Synthetic oligonucleotide
gcaggtatatgcgctagttatcaga

SEQ ID NO: 853 - DNA, 25 bp, Artificial Sequence
  Synthetic oligonucleotide
gcaggtatatgcgctagttatcaga

SEQ ID NO: 854 - DNA, 25 bp, Artificial Sequence
  Synthetic oligonucleotide
gcaggtatatgcgctagttatcaga

SEQ ID NO: 855 - DNA, 25 bp, Artificial Sequence
  Synthetic oligonucleotide
gcaggtatatgcgctagttatcaga

SEQ ID NO: 856 - DNA, 25 bp, Artificial Sequence
  Synthetic oligonucleotide
gcaggtatatgcgctagttatcaga

SEQ ID NO: 857 - DNA, 25 bp, Artificial Sequence
  Synthetic oligonucleotide
gcaggtatatgcgctagttatcaga

SEQ ID NO: 858 - DNA, 25 bp, Artificial Sequence
  Synthetic oligonucleotide
gcaggtatatgcgctagttatcaga

SEQ ID NO: 859 - DNA, 25 bp, Artificial Sequence
  Synthetic oligonucleotide
gcaggtatatgcgctagttatcaga

SEQ ID NO: 860 - DNA, 28 bp, Artificial Sequence
  Synthetic oligonucleotide
ggtatatgcgctagttatcagactcaga

SEQ ID NO: 861 - DNA, 28 bp, Artificial Sequence
  Synthetic oligonucleotide
ggtatatgcgctagttatcagactcaga

SEQ ID NO: 862 - DNA, 28 bp, Artificial Sequence
  Synthetic oligonucleotide
ggtatatgcgctagttatcagactcaga

SEQ ID NO: 863 - DNA, 28 bp, Artificial Sequence
  Synthetic oligonucleotide
ggtatatgcgctagttatcagactcaga

SEQ ID NO: 864 - DNA, 28 bp, Artificial Sequence
  Synthetic oligonucleotide
ggtatatgcgctagttatcagactcaga

SEQ ID NO: 865 - DNA, 28 bp, Artificial Sequence
  Synthetic oligonucleotide
ggtatatgcgctagttatcagactcaga

SEQ ID NO: 866 - DNA, 28 bp, Artificial Sequence
  Synthetic oligonucleotide
ggtatatgcgctagttatcagactcaga

SEQ ID NO: 867 - DNA, 28 bp, Artificial Sequence
  Synthetic oligonucleotide
ggtatatgcgctagttatcagactcaga

SEQ ID NO: 868 - DNA, 21 bp, Artificial Sequence
  Synthetic oligonucleotide
ggtgcaggtatatgcgctagt

SEQ ID NO: 869 - DNA, 21 bp, Artificial Sequence
  Synthetic oligonucleotide
ggtgcaggtatatgcgctagt

SEQ ID NO: 870 - DNA, 21 bp, Artificial Sequence
  Synthetic oligonucleotide
ggtgcaggtatatgcgctagt

SEQ ID NO: 871 - DNA, 21 bp, Artificial Sequence
  Synthetic oligonucleotide
ggtgcaggtatatgcgctagt

SEQ ID NO: 872 - DNA, 21 bp, Artificial Sequence
  Synthetic oligonucleotide
ggtgcaggtatatgcgctagt

SEQ ID NO: 873 - DNA, 23 bp, Artificial Sequence
  Synthetic oligonucleotide
ggtgcaggtatatgcgctagtta

SEQ ID NO: 874 - DNA, 22 bp, Artificial Sequence
  Synthetic oligonucleotide
ggtgcaggtatatgcgctagtt

SEQ ID NO: 875 - DNA, 23 bp, Artificial Sequence
  Synthetic oligonucleotide
ggtgcaggtatatgcgctagtta

SEQ ID NO: 876 - DNA, 23 bp, Artificial Sequence
  Synthetic oligonucleotide
ggtgcaggtatatgcgctagtta

SEQ ID NO: 877 - DNA, 23 bp, Artificial Sequence
  Synthetic oligonucleotide
ggtgcaggtatatgcgctagtta

SEQ ID NO: 878 - DNA, 23 bp, Artificial Sequence
  Synthetic oligonucleotide
ggtgcaggtatatgcgctagtta

SEQ ID NO: 879 - DNA, 23 bp, Artificial Sequence
  Synthetic oligonucleotide
ggtgcaggtatatgcgctagtta

SEQ ID NO: 880 - DNA, 23 bp, Artificial Sequence
  Synthetic oligonucleotide
ggtgcaggtatatgcgctagtta

SEQ ID NO: 881 - DNA, 23 bp, Artificial Sequence
  Synthetic oligonucleotide
ggtgcaggtatatgcgctagtta

SEQ ID NO: 882 - DNA, 23 bp, Artificial Sequence
  Synthetic oligonucleotide
ggtgcaggtatatgcgctagtta

SEQ ID NO: 883 - DNA, 23 bp, Artificial Sequence
  Synthetic oligonucleotide
ggtgcaggtatatgcgctagtta

SEQ ID NO: 884 - DNA, 24 bp, Artificial Sequence
  Synthetic oligonucleotide
ggtgcaggtatatgcgctagttat

SEQ ID NO: 885 - DNA, 25 bp, Artificial Sequence
  Synthetic oligonucleotide
ggtgcaggtatatgcgctagttatc

SEQ ID NO: 886 - DNA, 24 bp, Artificial Sequence
  Synthetic oligonucleotide
ggtgcaggtatatgcgctagttat

SEQ ID NO: 887 - DNA, 25 bp, Artificial Sequence
  Synthetic oligonucleotide
ggtgcaggtatatgcgctagttatc

SEQ ID NO: 888 - DNA, 25 bp, Artificial Sequence
  Synthetic oligonucleotide
ggtgcaggtatatgcgctagttatc

SEQ ID NO: 889 - DNA, 25 bp, Artificial Sequence
  Synthetic oligonucleotide
ggtgcaggtatatgcgctagttatc

SEQ ID NO: 890 - DNA, 25 bp, Artificial Sequence
  Synthetic oligonucleotide
ggtgcaggtatatgcgctagttatc

SEQ ID NO: 891 - DNA, 25 bp, Artificial Sequence
  Synthetic oligonucleotide
ggtgcaggtatatgcgctagttatc

SEQ ID NO: 892 - DNA, 25 bp, Artificial Sequence
  Synthetic oligonucleotide
ggtgcaggtatatgcgctagttatc

SEQ ID NO: 893 - DNA, 25 bp, Artificial Sequence
  Synthetic oligonucleotide
ggtgcaggtatatgcgctagttatc

SEQ ID NO: 894 - DNA, 25 bp, Artificial Sequence
  Synthetic oligonucleotide
ggtgcaggtatatgcgctagttatc

SEQ ID NO: 895 - DNA, 25 bp, Artificial Sequence
  Synthetic oligonucleotide
ggtgcaggtatatgcgctagttatc

SEQ ID NO: 896 - DNA, 24 bp, Artificial Sequence
  Synthetic oligonucleotide
ggtgcaggtatatgcgctagttat

SEQ ID NO: 897 - DNA, 23 bp, Artificial Sequence
  Synthetic oligonucleotide
ggtgcaggtatatgcgctagtta

SEQ ID NO: 898 - DNA, 23 bp, Artificial Sequence
  Synthetic oligonucleotide
ggtgcaggtatatgcgctagtta

SEQ ID NO: 899 - DNA, 24 bp, Artificial Sequence
  Synthetic oligonucleotide
ggtgcaggtatatgcgctagttat

SEQ ID NO: 900 - DNA, 24 bp, Artificial Sequence
  Synthetic oligonucleotide
ggtgcaggtatatgcgctagttat

SEQ ID NO: 901 - DNA, 24 bp, Artificial Sequence
  Synthetic oligonucleotide
ggtgcaggtatatgcgctagttat

SEQ ID NO: 902 - DNA, 24 bp, Artificial Sequence
  Synthetic oligonucleotide
ggtgcaggtatatgcgctagttat

SEQ ID NO: 903 - DNA, 24 bp, Artificial Sequence
  Synthetic oligonucleotide
ggtgcaggtatatgcgctagttat

SEQ ID NO: 904 - DNA, 24 bp, Artificial Sequence
  Synthetic oligonucleotide
ggtgcaggtatatgcgctagttat

SEQ ID NO: 905 - DNA, 24 bp, Artificial Sequence
  Synthetic oligonucleotide
ggtgcaggtatatgcgctagttat

SEQ ID NO: 906 - DNA, 24 bp, Artificial Sequence
  Synthetic oligonucleotide
ggtgcaggtatatgcgctagttat

SEQ ID NO: 907 - DNA, 24 bp, Artificial Sequence
  Synthetic oligonucleotide
ggtgcaggtatatgcgctagttat

SEQ ID NO: 908 - DNA, 22 bp, Artificial Sequence
  Synthetic oligonucleotide
ggtgcaggtatatgcgctagtt

SEQ ID NO: 909 - DNA, 22 bp, Artificial Sequence
  Synthetic oligonucleotide
ggtgcaggtatatgcgctagtt

SEQ ID NO: 910 - DNA, 21 bp, Artificial Sequence
  Synthetic oligonucleotide
ggtgcaggtatatgcgctagt

SEQ ID NO: 911 - DNA, 21 bp, Artificial Sequence
  Synthetic oligonucleotide
ggtgcaggtatatgcgctagt

SEQ ID NO: 912 - DNA, 22 bp, Artificial Sequence
  Synthetic oligonucleotide
ggtgcaggtatatgcgctagtt

SEQ ID NO: 913 - DNA, 22 bp, Artificial Sequence
  Synthetic oligonucleotide
ggtgcaggtatatgcgctagtt

SEQ ID NO: 914 - DNA, 22 bp, Artificial Sequence
  Synthetic oligonucleotide
ggtgcaggtatatgcgctagtt

SEQ ID NO: 915 - DNA, 22 bp, Artificial Sequence
  Synthetic oligonucleotide
ggtgcaggtatatgcgctagtt

SEQ ID NO: 916 - DNA, 22 bp, Artificial Sequence
  Synthetic oligonucleotide
ggtgcaggtatatgcgctagtt

SEQ ID NO: 917 - DNA, 22 bp, Artificial Sequence
  Synthetic oligonucleotide
ggtgcaggtatatgcgctagtt

SEQ ID NO: 918 - DNA, 22 bp, Artificial Sequence
  Synthetic oligonucleotide
ggtgcaggtatatgcgctagtt

SEQ ID NO: 919 - DNA, 22 bp, Artificial Sequence
  Synthetic oligonucleotide
ggtgcaggtatatgcgctagtt

SEQ ID NO: 920 - DNA, 22 bp, Artificial Sequence
  Synthetic oligonucleotide
ggtgcaggtatatgcgctagtt

SEQ ID NO: 921 - DNA, 25 bp, Artificial Sequence
  Synthetic oligonucleotide
gtgcaggtatatgcgctagttatca

SEQ ID NO: 922 - DNA, 25 bp, Artificial Sequence
  Synthetic oligonucleotide
gtgcaggtatatgcgctagttatca

SEQ ID NO: 923 - DNA, 25 bp, Artificial Sequence
  Synthetic oligonucleotide
gtgcaggtatatgcgctagttatca

SEQ ID NO: 924 - DNA, 25 bp, Artificial Sequence
  Synthetic oligonucleotide
gtgcaggtatatgcgctagttatca

SEQ ID NO: 925 - DNA, 25 bp, Artificial Sequence
  Synthetic oligonucleotide
gtgcaggtatatgcgctagttatca

SEQ ID NO: 926 - DNA, 25 bp, Artificial Sequence
  Synthetic oligonucleotide
gtgcaggtatatgcgctagttatca

SEQ ID NO: 927 - DNA, 25 bp, Artificial Sequence
  Synthetic oligonucleotide
gtgcaggtatatgcgctagttatca

SEQ ID NO: 928 - DNA, 25 bp, Artificial Sequence
  Synthetic oligonucleotide
gtgcaggtatatgcgctagttatca

SEQ ID NO: 929 - DNA, 25 bp, Artificial Sequence
  Synthetic oligonucleotide
gtgcaggtatatgcgctagttatca

SEQ ID NO: 930 - DNA, 25 bp, Artificial Sequence
  Synthetic oligonucleotide
gtgcaggtatatgcgctagttatca

SEQ ID NO: 931 - DNA, 25 bp, Artificial Sequence
  Synthetic oligonucleotide
gtgcaggtatatgcgctagttatca

SEQ ID NO: 932 - DNA, 25 bp, Artificial Sequence
  Synthetic oligonucleotide
gtgcaggtatatgcgctagttatca

SEQ ID NO: 933 - DNA, 25 bp, Artificial Sequence
  Synthetic oligonucleotide
tgcaggtatatgcgctagttatcag

SEQ ID NO: 934 - DNA, 25 bp, Artificial Sequence
  Synthetic oligonucleotide
tgcaggtatatgcgctagttatcag

SEQ ID NO: 935 - DNA, 25 bp, Artificial Sequence
  Synthetic oligonucleotide
tgcaggtatatgcgctagttatcag

SEQ ID NO: 936 - DNA, 25 bp, Artificial Sequence
  Synthetic oligonucleotide
tgcaggtatatgcgctagttatcag

SEQ ID NO: 937 - DNA, 25 bp, Artificial Sequence
  Synthetic oligonucleotide
tgcaggtatatgcgctagttatcag

SEQ ID NO: 938 - DNA, 25 bp, Artificial Sequence
  Synthetic oligonucleotide
tgcaggtatatgcgctagttatcag

SEQ ID NO: 939 - DNA, 25 bp, Artificial Sequence
  Synthetic oligonucleotide
tgcaggtatatgcgctagttatcag

SEQ ID NO: 940 - DNA, 25 bp, Artificial Sequence
  Synthetic oligonucleotide
tgcaggtatatgcgctagttatcag

SEQ ID NO: 941 - DNA, 25 bp, Artificial Sequence
  Synthetic oligonucleotide
tgcaggtatatgcgctagttatcag

SEQ ID NO: 942 - DNA, 25 bp, Artificial Sequence
  Synthetic oligonucleotide
tgcaggtatatgcgctagttatcag

SEQ ID NO: 943 - DNA, 25 bp, Artificial Sequence
  Synthetic oligonucleotide
tgcaggtatatgcgctagttatcag

SEQ ID NO: 944 - DNA, 25 bp, Artificial Sequence
  Synthetic oligonucleotide
tgcaggtatatgcgctagttatcag

SEQ ID NO: 945 - DNA, 25 bp, Artificial Sequence
  Synthetic oligonucleotide
tgcgctagttatcagactcagacta

SEQ ID NO: 946 - DNA, 24 bp, Artificial Sequence
  Synthetic oligonucleotide
tgcgctagttatcagactcagact

SEQ ID NO: 947 - DNA, 25 bp, Artificial Sequence
  Synthetic oligonucleotide
tgcgctagttatcagactcagacta

SEQ ID NO: 948 - DNA, 25 bp, Artificial Sequence
  Synthetic oligonucleotide
tgcgctagttatcagactcagacta

SEQ ID NO: 949 - DNA, 25 bp, Artificial Sequence
  Synthetic oligonucleotide
tgcgctagttatcagactcagacta

SEQ ID NO: 950 - DNA, 25 bp, Artificial Sequence
  Synthetic oligonucleotide
tgcgctagttatcagactcagacta

SEQ ID NO: 951 - DNA, 25 bp, Artificial Sequence
  Synthetic oligonucleotide
tgcgctagttatcagactcagacta

SEQ ID NO: 952 - DNA, 25 bp, Artificial Sequence
  Synthetic oligonucleotide
tgcgctagttatcagactcagacta

SEQ ID NO: 953 - DNA, 25 bp, Artificial Sequence
  Synthetic oligonucleotide
tgcgctagttatcagactcagacta

SEQ ID NO: 954 - DNA, 24 bp, Artificial Sequence
  Synthetic oligonucleotide
tgcgctagttatcagactcagact

SEQ ID NO: 955 - DNA, 24 bp, Artificial Sequence
  Synthetic oligonucleotide
tgcgctagttatcagactcagact

SEQ ID NO: 956 - DNA, 24 bp, Artificial Sequence
  Synthetic oligonucleotide
tgcgctagttatcagactcagact

SEQ ID NO: 957 - DNA, 24 bp, Artificial Sequence
  Synthetic oligonucleotide
tgcgctagttatcagactcagact

SEQ ID NO: 958 - DNA, 24 bp, Artificial Sequence
  Synthetic oligonucleotide
tgcgctagttatcagactcagact

SEQ ID NO: 959 - DNA, 24 bp, Artificial Sequence
  Synthetic oligonucleotide
tgcgctagttatcagactcagact

SEQ ID NO: 960 - DNA, 24 bp, Artificial Sequence
  Synthetic oligonucleotide
tgcgctagttatcagactcagact

SEQ ID NO: 961 - DNA, 24 bp, Artificial Sequence
  Synthetic oligonucleotide
tgcgctagttatcagactcagact

SEQ ID NO: 962 - DNA, 24 bp, Artificial Sequence
  Synthetic oligonucleotide
tgcgctagttatcagactcagact

SEQ ID NO: 963 - DNA, 24 bp, Artificial Sequence
  Synthetic oligonucleotide
tgcgctagttatcagactcagact

SEQ ID NO: 964 - DNA, 24 bp, Artificial Sequence
  Synthetic oligonucleotide
tgcgctagttatcagactcagact

SEQ ID NO: 965 - DNA, 22 bp, Artificial Sequence
  Synthetic oligonucleotide
ttggtgcaggtatatgcgctag

SEQ ID NO: 966 - DNA, 22 bp, Artificial Sequence
  Synthetic oligonucleotide
ttggtgcaggtatatgcgctag

SEQ ID NO: 967 - DNA, 22 bp, Artificial Sequence
  Synthetic oligonucleotide
ttggtgcaggtatatgcgctag

SEQ ID NO: 968 - DNA, 24 bp, Artificial Sequence
  Synthetic oligonucleotide
tgcgctagttatcagactcagact

SEQ ID NO: 969 - DNA, 24 bp, Artificial Sequence
  Synthetic oligonucleotide
cctcatggtgtagtcttcttgcat

SEQ ID NO: 970 - DNA, 24 bp, Artificial Sequence
  Synthetic oligonucleotide
cctcatggtgtagtcttcttgcat

SEQ ID NO: 971 - DNA, 24 bp, Artificial Sequence
  Synthetic oligonucleotide
cctcatggtgtagtcttcttgcat

SEQ ID NO: 972 - DNA, 31 bp, Artificial Sequence; identical to SEQ ID NO: 328
  Synthetic oligonucleotide

SEQ ID NO: 973 - DNA, 31 bp, Artificial Sequence; identical to SEQ ID NO: 328
  Synthetic oligonucleotide

SEQ ID NO: 974 - DNA, 31 bp, Artificial Sequence; identical to SEQ ID NO: 328
  Synthetic oligonucleotide

SEQ ID NO: 975 - DNA, 31 bp, Artificial Sequence; identical to SEQ ID NO: 328
  Synthetic oligonucleotide

SEQ ID NO: 976 - DNA, 26 bp, Artificial Sequence
  Synthetic oligonucleotide
tggtgttgaaggttttaattgttact

SEQ ID NO: 977 - DNA, 25 bp, Artificial Sequence
  Synthetic oligonucleotide
tcttgattctaaggttggtggtaat

SEQ ID NO: 978 - DNA, 28 bp, Artificial Sequence
  Synthetic oligonucleotide
caaaccttttgagagagatatttcaact

SEQ ID NO: 979 - DNA, 31 bp, Artificial Sequence; identical to SEQ ID NO: 328
  Synthetic oligonucleotide

SEQ ID NO: 980 - DNA, 26 bp, Artificial Sequence
  Synthetic oligonucleotide
cgtggtgtttattaccctgacaaagt

SEQ ID NO: 981 - DNA, 27 bp, Artificial Sequence
  Synthetic oligonucleotide
ccaggaacaaatacttctaaccaggtt

SEQ ID NO: 982 - DNA, 23 bp, Artificial Sequence
  Synthetic oligonucleotide
ggtgcaggtatatgcgctagtta

SEQ ID NO: 983 - DNA, 22 bp, Artificial Sequence
  Synthetic oligonucleotide
ggtgcaggtatatgcgctagtt

SEQ ID NO: 984 - DNA, 23 bp, Artificial Sequence
  Synthetic oligonucleotide
ggtgcaggtatatgcgctagtta

SEQ ID NO: 985 - DNA, 23 bp, Artificial Sequence
  Synthetic oligonucleotide
ggtgcaggtatatgcgctagtta

SEQ ID NO: 986 - DNA, 22 bp, Artificial Sequence
  Synthetic oligonucleotide
ggtgcaggtatatgcgctagtt

SEQ ID NO: 987 - DNA, 22 bp, Artificial Sequence
  Synthetic oligonucleotide
acccattggtgcaggtatatgc

SEQ ID NO: 988 - DNA, 25 bp, Artificial Sequence
  Synthetic oligonucleotide
caagtgcacttggaaaacttcaaga

SEQ ID NO: 989 - DNA, 25 bp, Artificial Sequence
  Synthetic oligonucleotide
caagtgcacttggaaaacttcaaga

SEQ ID NO: 990 - DNA, 25 bp, Artificial Sequence
  Synthetic oligonucleotide
ggaccttgaaggaaaacagggtaat

SEQ ID NO: 991 - DNA, 25 bp, Artificial Sequence
  Synthetic oligonucleotide
ggaccttgaaggaaaacagggtaat

SEQ ID NO: 992 - DNA, 30 bp, Artificial Sequence; identical to SEQ ID NO: 407
  Synthetic oligonucleotide

SEQ ID NO: 993 - DNA, 31 bp, Artificial Sequence; identical to SEQ ID NO: 547
  Synthetic oligonucleotide

SEQ ID NO: 994 - DNA, 31 bp, Artificial Sequence; identical to SEQ ID NO: 547
  Synthetic oligonucleotide

SEQ ID NO: 995 - DNA, 31 bp, Artificial Sequence; identical to SEQ ID NO: 547
  Synthetic oligonucleotide

SEQ ID NO: 996 - DNA, 31 bp, Artificial Sequence; identical to SEQ ID NO: 547
  Synthetic oligonucleotide

SEQ ID NO: 997 - DNA, 31 bp, Artificial Sequence; identical to SEQ ID NO: 547
  Synthetic oligonucleotide

SEQ ID NO: 998 - DNA, 31 bp, Artificial Sequence; identical to SEQ ID NO: 547
  Synthetic oligonucleotide

SEQ ID NO: 999 - DNA, 31 bp, Artificial Sequence; identical to SEQ ID NO: 547
  Synthetic oligonucleotide

SEQ ID NO: 1000 - DNA, 31 bp, Artificial Sequence; identical to SEQ ID NO: 547
  Synthetic oligonucleotide

SEQ ID NO: 1001 - DNA, 31 bp, Artificial Sequence; identical to SEQ ID NO: 547
  Synthetic oligonucleotide

SEQ ID NO: 1002 - DNA, 31 bp, Artificial Sequence; identical to SEQ ID NO: 547
  Synthetic oligonucleotide

SEQ ID NO: 1003 - DNA, 31 bp, Artificial Sequence; identical to SEQ ID NO: 547
  Synthetic oligonucleotide

SEQ ID NO: 1004 - DNA, 31 bp, Artificial Sequence; identical to SEQ ID NO: 764
  Synthetic oligonucleotide

SEQ ID NO: 1005 - DNA, 31 bp, Artificial Sequence; identical to SEQ ID NO: 764
  Synthetic oligonucleotide

SEQ ID NO: 1006 - DNA, 31 bp, Artificial Sequence; identical to SEQ ID NO: 764
  Synthetic oligonucleotide

SEQ ID NO: 1007 - DNA, 31 bp, Artificial Sequence; identical to SEQ ID NO: 764
  Synthetic oligonucleotide

SEQ ID NO: 1008 - DNA, 31 bp, Artificial Sequence; identical to SEQ ID NO: 764
  Synthetic oligonucleotide

SEQ ID NO: 1009 - DNA, 31 bp, Artificial Sequence; identical to SEQ ID NO: 764
  Synthetic oligonucleotide

SEQ ID NO: 1010 - DNA, 31 bp, Artificial Sequence; identical to SEQ ID NO: 764
  Synthetic oligonucleotide

SEQ ID NO: 1011 - DNA, 31 bp, Artificial Sequence; identical to SEQ ID NO: 764
  Synthetic oligonucleotide

SEQ ID NO: 1012 - DNA, 31 bp, Artificial Sequence; identical to SEQ ID NO: 764
  Synthetic oligonucleotide

SEQ ID NO: 1013 - DNA, 31 bp, Artificial Sequence; identical to SEQ ID NO: 764
  Synthetic oligonucleotide

SEQ ID NO: 1014 - DNA, 31 bp, Artificial Sequence; identical to SEQ ID NO: 764
  Synthetic oligonucleotide

SEQ ID NO: 1015 - DNA, 30 bp, Artificial Sequence; identical to SEQ ID NO: 407
  Synthetic oligonucleotide

SEQ ID NO: 1016 - DNA, 30 bp, Artificial Sequence; identical to SEQ ID NO: 407
  Synthetic oligonucleotide

SEQ ID NO: 1017 - DNA, 30 bp, Artificial Sequence; identical to SEQ ID NO: 407
  Synthetic oligonucleotide

SEQ ID NO: 1018 - DNA, 30 bp, Artificial Sequence; identical to SEQ ID NO: 407
  Synthetic oligonucleotide

SEQ ID NO: 1019 - DNA, 30 bp, Artificial Sequence; identical to SEQ ID NO: 407
  Synthetic oligonucleotide

SEQ ID NO: 1020 - DNA, 30 bp, Artificial Sequence; identical to SEQ ID NO: 407
  Synthetic oligonucleotide

SEQ ID NO: 1021 - DNA, 30 bp, Artificial Sequence; identical to SEQ ID NO: 407
  Synthetic oligonucleotide

SEQ ID NO: 1022 - DNA, 30 bp, Artificial Sequence; identical to SEQ ID NO: 407
  Synthetic oligonucleotide

SEQ ID NO: 1023 - DNA, 30 bp, Artificial Sequence; identical to SEQ ID NO: 407
  Synthetic oligonucleotide

SEQ ID NO: 1024 - DNA, 30 bp, Artificial Sequence; identical to SEQ ID NO: 407
  Synthetic oligonucleotide

SEQ ID NO: 1025 - DNA, 30 bp, Artificial Sequence; identical to SEQ ID NO: 407
  Synthetic oligonucleotide

SEQ ID NO: 1026 - DNA, 30 bp, Artificial Sequence; identical to SEQ ID NO: 407
  Synthetic oligonucleotide

SEQ ID NO: 1027 - DNA, 30 bp, Artificial Sequence; identical to SEQ ID NO: 773
  Synthetic oligonucleotide

SEQ ID NO: 1028 - DNA, 30 bp, Artificial Sequence; identical to SEQ ID NO: 773
  Synthetic oligonucleotide

SEQ ID NO: 1029 - DNA, 30 bp, Artificial Sequence; identical to SEQ ID NO: 773
  Synthetic oligonucleotide

SEQ ID NO: 1030 - DNA, 30 bp, Artificial Sequence; identical to SEQ ID NO: 773
  Synthetic oligonucleotide

SEQ ID NO: 1031 - DNA, 30 bp, Artificial Sequence; identical to SEQ ID NO: 773
  Synthetic oligonucleotide

SEQ ID NO: 1032 - DNA, 30 bp, Artificial Sequence; identical to SEQ ID NO: 773
  Synthetic oligonucleotide

SEQ ID NO: 1033 - DNA, 30 bp, Artificial Sequence; identical to SEQ ID NO: 773
  Synthetic oligonucleotide

SEQ ID NO: 1034 - DNA, 30 bp, Artificial Sequence; identical to SEQ ID NO: 773
  Synthetic oligonucleotide

SEQ ID NO: 1035 - DNA, 30 bp, Artificial Sequence; identical to SEQ ID NO: 773
  Synthetic oligonucleotide

SEQ ID NO: 1036 - DNA, 30 bp, Artificial Sequence; identical to SEQ ID NO: 773
  Synthetic oligonucleotide

SEQ ID NO: 1037 - DNA, 30 bp, Artificial Sequence; identical to SEQ ID NO: 773
  Synthetic oligonucleotide

SEQ ID NO: 1038 - DNA, 30 bp, Artificial Sequence; identical to SEQ ID NO: 773
  Synthetic oligonucleotide

SEQ ID NO: 1039 - DNA, 31 bp, Artificial Sequence; identical to SEQ ID NO: 545
  Synthetic oligonucleotide

SEQ ID NO: 1040 - DNA, 31 bp, Artificial Sequence; identical to SEQ ID NO: 545
  Synthetic oligonucleotide

SEQ ID NO: 1041 - DNA, 31 bp, Artificial Sequence; identical to SEQ ID NO: 545
  Synthetic oligonucleotide

SEQ ID NO: 1042 - DNA, 31 bp, Artificial Sequence; identical to SEQ ID NO: 545
  Synthetic oligonucleotide

SEQ ID NO: 1043 - DNA, 31 bp, Artificial Sequence; identical to SEQ ID NO: 545
  Synthetic oligonucleotide

SEQ ID NO: 1044 - DNA, 31 bp, Artificial Sequence; identical to SEQ ID NO: 545
  Synthetic oligonucleotide

SEQ ID NO: 1045 - DNA, 31 bp, Artificial Sequence; identical to SEQ ID NO: 545
  Synthetic oligonucleotide

SEQ ID NO: 1046 - DNA, 31 bp, Artificial Sequence; identical to SEQ ID NO: 545
  Synthetic oligonucleotide

SEQ ID NO: 1047 - DNA, 31 bp, Artificial Sequence; identical to SEQ ID NO: 545
  Synthetic oligonucleotide

SEQ ID NO: 1048 - DNA, 31 bp, Artificial Sequence; identical to SEQ ID NO: 545
  Synthetic oligonucleotide

SEQ ID NO: 1049 - DNA, 31 bp, Artificial Sequence; identical to SEQ ID NO: 545
  Synthetic oligonucleotide

SEQ ID NO: 1050 - DNA, 24 bp, Artificial Sequence
  Synthetic oligonucleotide
cttgtgcccttttggtgaagtttt

SEQ ID NO: 1051 - DNA, 24 bp, Artificial Sequence
  Synthetic oligonucleotide
cttgtgcccttttggtgaagtttt

SEQ ID NO: 1052 - DNA, 29 bp, Artificial Sequence
  Synthetic oligonucleotide
atgtttgtttttcttgttttattgccact

SEQ ID NO: 1053 - DNA, 24 bp, Artificial Sequence
  Synthetic oligonucleotide
ggaagagaatcagcaactgtgttg

SEQ ID NO: 1054 - DNA, 31 bp, Artificial Sequence; identical to SEQ ID NO: 328
  Synthetic oligonucleotide

SEQ ID NO: 1055 - DNA, 28 bp, Artificial Sequence
  Synthetic oligonucleotide
accttttgagagagatatttcaactgaa

SEQ ID NO: 1056 - DNA, 21 bp, Artificial Sequence
  Synthetic oligonucleotide
acttctaaccaggttgctgtt

SEQ ID NO: 1057 - DNA, 27 bp, Artificial Sequence
  Synthetic oligonucleotide
ccaggaacaaatacttctaaccaggtt

SEQ ID NO: 1058 - DNA, 25 bp, Artificial Sequence
  Synthetic oligonucleotide
tcttgattctaaggttggtggtaat

SEQ ID NO: 1059 - DNA, 30 bp, Artificial Sequence; identical to SEQ ID NO: 412
  Synthetic oligonucleotide

SEQ ID NO: 1060 - DNA, 31 bp, Artificial Sequence; identical to SEQ ID NO: 328
  Synthetic oligonucleotide

SEQ ID NO: 1061 - DNA, 28 bp, Artificial Sequence
  Synthetic oligonucleotide
accttttgagagagatatttcaactgaa

SEQ ID NO: 1062 - DNA, 24 bp, Artificial Sequence
  Synthetic oligonucleotide
caactgaaatctatcaggccggta

SEQ ID NO: 1063 - DNA, 25 bp, Artificial Sequence
  Synthetic oligonucleotide
agctccaattttggtgcaatttcaa

SEQ ID NO: 1064 - DNA, 26 bp, Artificial Sequence
  Synthetic oligonucleotide
aacttagctccaattttggtgcaatt

SEQ ID NO: 1065 - DNA, 26 bp, Artificial Sequence
  Synthetic oligonucleotide
aacttagctccaattttggtgcaatt

SEQ ID NO: 1066 - DNA, 26 bp, Artificial Sequence
  Synthetic oligonucleotide
aacttagctccaattttggtgcaatt

SEQ ID NO: 1067 - DNA, 26 bp, Artificial Sequence
  Synthetic oligonucleotide
aacttagctccaattttggtgcaatt

SEQ ID NO: 1068 - DNA, 26 bp, Artificial Sequence
  Synthetic oligonucleotide
aacttagctccaattttggtgcaatt

SEQ ID NO: 1069 - DNA, 26 bp, Artificial Sequence
  Synthetic oligonucleotide
aacttagctccaattttggtgcaatt

SEQ ID NO: 1070 - DNA, 26 bp, Artificial Sequence
  Synthetic oligonucleotide
aacttagctccaattttggtgcaatt

SEQ ID NO: 1071 - DNA, 26 bp, Artificial Sequence
  Synthetic oligonucleotide
aacttagctccaattttggtgcaatt

SEQ ID NO: 1072 - DNA, 25 bp, Artificial Sequence
  Synthetic oligonucleotide
agctccaattttggtgcaatttcaa

SEQ ID NO: 1073 - DNA, 25 bp, Artificial Sequence
  Synthetic oligonucleotide
agctccaattttggtgcaatttcaa

SEQ ID NO: 1074 - DNA, 25 bp, Artificial Sequence
  Synthetic oligonucleotide
agctccaattttggtgcaatttcaa

SEQ ID NO: 1075 - DNA, 25 bp, Artificial Sequence
  Synthetic oligonucleotide
agctccaattttggtgcaatttcaa

SEQ ID NO: 1076 - DNA, 25 bp, Artificial Sequence
  Synthetic oligonucleotide
agctccaattttggtgcaatttcaa

SEQ ID NO: 1077 - DNA, 25 bp, Artificial Sequence
  Synthetic oligonucleotide
agctccaattttggtgcaatttcaa

SEQ ID NO: 1078 - DNA, 25 bp, Artificial Sequence
  Synthetic oligonucleotide
agctccaattttggtgcaatttcaa

SEQ ID NO: 1079 - DNA, 25 bp, Artificial Sequence
  Synthetic oligonucleotide
agctccaattttggtgcaatttcaa

SEQ ID NO: 1080 - DNA, 25 bp, Artificial Sequence
  Synthetic oligonucleotide
agctccaattttggtgcaatttcaa

SEQ ID NO: 1081 - DNA, 25 bp, Artificial Sequence
  Synthetic oligonucleotide
agctccaattttggtgcaatttcaa

SEQ ID NO: 1082 - DNA, 25 bp, Artificial Sequence
  Synthetic oligonucleotide
caacttagctccaattttggtgcaa

SEQ ID NO: 1083 - DNA, 25 bp, Artificial Sequence
  Synthetic oligonucleotide
caacttagctccaattttggtgcaa

SEQ ID NO: 1084 - DNA, 25 bp, Artificial Sequence
  Synthetic oligonucleotide
caacttagctccaattttggtgcaa

SEQ ID NO: 1085 - DNA, 25 bp, Artificial Sequence
  Synthetic oligonucleotide
caacttagctccaattttggtgcaa

SEQ ID NO: 1086 - DNA, 25 bp, Artificial Sequence
  Synthetic oligonucleotide
caacttagctccaattttggtgcaa

SEQ ID NO: 1087 - DNA, 25 bp, Artificial Sequence
  Synthetic oligonucleotide
caacttagctccaattttggtgcaa

SEQ ID NO: 1088 - DNA, 25 bp, Artificial Sequence
  Synthetic oligonucleotide
caacttagctccaattttggtgcaa

SEQ ID NO: 1089 - DNA, 25 bp, Artificial Sequence
  Synthetic oligonucleotide
caacttagctccaattttggtgcaa

SEQ ID NO: 1090 - DNA, 25 bp, Artificial Sequence
  Synthetic oligonucleotide
caacttagctccaattttggtgcaa

SEQ ID NO: 1091 - DNA, 25 bp, Artificial Sequence
  Synthetic oligonucleotide
caacttagctccaattttggtgcaa

SEQ ID NO: 1092 - DNA, 26 bp, Artificial Sequence
  Synthetic oligonucleotide
caacttagctccaattttggtgcaat

SEQ ID NO: 1093 - DNA, 26 bp, Artificial Sequence
  Synthetic oligonucleotide
caacttagctccaattttggtgcaat

SEQ ID NO: 1094 - DNA, 26 bp, Artificial Sequence
  Synthetic oligonucleotide
caacttagctccaattttggtgcaat

SEQ ID NO: 1095 - DNA, 26 bp, Artificial Sequence
  Synthetic oligonucleotide
caacttagctccaattttggtgcaat

SEQ ID NO: 1096 - DNA, 26 bp, Artificial Sequence
  Synthetic oligonucleotide
caacttagctccaattttggtgcaat

SEQ ID NO: 1097 - DNA, 26 bp, Artificial Sequence
  Synthetic oligonucleotide
caacttagctccaattttggtgcaat

SEQ ID NO: 1098 - DNA, 25 bp, Artificial Sequence
  Synthetic oligonucleotide
caacttagctccaattttggtgcaa

SEQ ID NO: 1099 - DNA, 26 bp, Artificial Sequence
  Synthetic oligonucleotide
caacttagctccaattttggtgcaat

SEQ ID NO: 1100 - DNA, 26 bp, Artificial Sequence
  Synthetic oligonucleotide
caacttagctccaattttggtgcaat

SEQ ID NO: 1101 - DNA, 24 bp, Artificial Sequence
  Synthetic oligonucleotide
caacttagctccaattttggtgca

SEQ ID NO: 1102 - DNA, 24 bp, Artificial Sequence
  Synthetic oligonucleotide
caacttagctccaattttggtgca

SEQ ID NO: 1103 - DNA, 24 bp, Artificial Sequence
  Synthetic oligonucleotide
caacttagctccaattttggtgca

SEQ ID NO: 1104 - DNA, 24 bp, Artificial Sequence
  Synthetic oligonucleotide
caacttagctccaattttggtgca

SEQ ID NO: 1105 - DNA, 24 bp, Artificial Sequence
  Synthetic oligonucleotide
caacttagctccaattttggtgca

SEQ ID NO: 1106 - DNA, 24 bp, Artificial Sequence
  Synthetic oligonucleotide
caacttagctccaattttggtgca

SEQ ID NO: 1107 - DNA, 24 bp, Artificial Sequence
  Synthetic oligonucleotide
caacttagctccaattttggtgca

SEQ ID NO: 1108 - DNA, 24 bp, Artificial Sequence
  Synthetic oligonucleotide
caacttagctccaattttggtgca

SEQ ID NO: 1109 - DNA, 27 bp, Artificial Sequence
  Synthetic oligonucleotide
ccaattttggtgcaatttcaagtgttt

SEQ ID NO: 1110 - DNA, 27 bp, Artificial Sequence
  Synthetic oligonucleotide
ccaattttggtgcaatttcaagtgttt

SEQ ID NO: 1111 - DNA, 27 bp, Artificial Sequence
  Synthetic oligonucleotide
ccaattttggtgcaatttcaagtgttt

SEQ ID NO: 1112 - DNA, 27 bp, Artificial Sequence
  Synthetic oligonucleotide
ccaattttggtgcaatttcaagtgttt

SEQ ID NO: 1113 - DNA, 27 bp, Artificial Sequence
  Synthetic oligonucleotide
ccaattttggtgcaatttcaagtgttt

SEQ ID NO: 1114 - DNA, 27 bp, Artificial Sequence
  Synthetic oligonucleotide
ccaattttggtgcaatttcaagtgttt

SEQ ID NO: 1115 - DNA, 27 bp, Artificial Sequence
  Synthetic oligonucleotide
ccaattttggtgcaatttcaagtgttt

SEQ ID NO: 1116 - DNA, 27 bp, Artificial Sequence
  Synthetic oligonucleotide
ccaattttggtgcaatttcaagtgttt

SEQ ID NO: 1117 - DNA, 30 bp, Artificial Sequence
  Synthetic oligonucleotide
ccaattttggtgcaatttcaagtgttttaa

SEQ ID NO: 1118 - DNA, 30 bp, Artificial Sequence; identical to SEQ ID NO: 1117
  Synthetic oligonucleotide

SEQ ID NO: 1119 - DNA, 30 bp, Artificial Sequence; identical to SEQ ID NO: 1117
  Synthetic oligonucleotide

SEQ ID NO: 1120 - DNA, 30 bp, Artificial Sequence; identical to SEQ ID NO: 1117
  Synthetic oligonucleotide

SEQ ID NO: 1121 - DNA, 30 bp, Artificial Sequence; identical to SEQ ID NO: 1117
  Synthetic oligonucleotide

SEQ ID NO: 1122 - DNA, 30 bp, Artificial Sequence; identical to SEQ ID NO: 1117
  Synthetic oligonucleotide

SEQ ID NO: 1123 - DNA, 30 bp, Artificial Sequence; identical to SEQ ID NO: 1117
  Synthetic oligonucleotide

SEQ ID NO: 1124 - DNA, 29 bp, Artificial Sequence
  Synthetic oligonucleotide
ccaattttggtgcaatttcaagtgtttta

SEQ ID NO: 1125 - DNA, 29 bp, Artificial Sequence
  Synthetic oligonucleotide
ccaattttggtgcaatttcaagtgtttta

SEQ ID NO: 1126 - DNA, 29 bp, Artificial Sequence
  Synthetic oligonucleotide
ccaattttggtgcaatttcaagtgtttta

SEQ ID NO: 1127 - DNA, 29 bp, Artificial Sequence
  Synthetic oligonucleotide
ccaattttggtgcaatttcaagtgtttta

SEQ ID NO: 1128 - DNA, 29 bp, Artificial Sequence
  Synthetic oligonucleotide
ccaattttggtgcaatttcaagtgtttta

SEQ ID NO: 1129 - DNA, 29 bp, Artificial Sequence
  Synthetic oligonucleotide
ccaattttggtgcaatttcaagtgtttta

SEQ ID NO: 1130 - DNA, 29 bp, Artificial Sequence
  Synthetic oligonucleotide
ccaattttggtgcaatttcaagtgtttta

SEQ ID NO: 1131 - DNA, 29 bp, Artificial Sequence
  Synthetic oligonucleotide
ccaattttggtgcaatttcaagtgtttta

SEQ ID NO: 1132 - DNA, 28 bp, Artificial Sequence
  Synthetic oligonucleotide
ccaattttggtgcaatttcaagtgtttt

SEQ ID NO: 1133 - DNA, 28 bp, Artificial Sequence
  Synthetic oligonucleotide
ccaattttggtgcaatttcaagtgtttt

SEQ ID NO: 1134 - DNA, 28 bp, Artificial Sequence
  Synthetic oligonucleotide
ccaattttggtgcaatttcaagtgtttt

SEQ ID NO: 1135 - DNA, 28 bp, Artificial Sequence
  Synthetic oligonucleotide
ccaattttggtgcaatttcaagtgtttt

SEQ ID NO: 1136 - DNA, 28 bp, Artificial Sequence
  Synthetic oligonucleotide
ccaattttggtgcaatttcaagtgtttt

SEQ ID NO: 1137 - DNA, 28 bp, Artificial Sequence
  Synthetic oligonucleotide
ccaattttggtgcaatttcaagtgtttt

SEQ ID NO: 1138 - DNA, 27 bp, Artificial Sequence
  Synthetic oligonucleotide
ccaattttggtgcaatttcaagtgttt

SEQ ID NO: 1139 - DNA, 28 bp, Artificial Sequence
  Synthetic oligonucleotide
ccaattttggtgcaatttcaagtgtttt

SEQ ID NO: 1140 - DNA, 28 bp, Artificial Sequence
  Synthetic oligonucleotide
ccaattttggtgcaatttcaagtgtttt

SEQ ID NO: 1141 - DNA, 26 bp, Artificial Sequence
  Synthetic oligonucleotide
ctccaattttggtgcaatttcaagtg

SEQ ID NO: 1142 - DNA, 26 bp, Artificial Sequence
  Synthetic oligonucleotide
ctccaattttggtgcaatttcaagtg

SEQ ID NO: 1143 - DNA, 26 bp, Artificial Sequence
  Synthetic oligonucleotide
ctccaattttggtgcaatttcaagtg

SEQ ID NO: 1144 - DNA, 26 bp, Artificial Sequence
  Synthetic oligonucleotide
ctccaattttggtgcaatttcaagtg

SEQ ID NO: 1145 - DNA, 26 bp, Artificial Sequence
  Synthetic oligonucleotide
ctccaattttggtgcaatttcaagtg

SEQ ID NO: 1146 - DNA, 26 bp, Artificial Sequence
  Synthetic oligonucleotide
ctccaattttggtgcaatttcaagtg

SEQ ID NO: 1147 - DNA, 26 bp, Artificial Sequence
  Synthetic oligonucleotide
ctccaattttggtgcaatttcaagtg

SEQ ID NO: 1148 - DNA, 26 bp, Artificial Sequence
  Synthetic oligonucleotide
ctccaattttggtgcaatttcaagtg

SEQ ID NO: 1149 - DNA, 27 bp, Artificial Sequence
  Synthetic oligonucleotide
cttagctccaattttggtgcaatttca

SEQ ID NO: 1150 - DNA, 27 bp, Artificial Sequence
  Synthetic oligonucleotide
cttagctccaattttggtgcaatttca

SEQ ID NO: 1151 - DNA, 27 bp, Artificial Sequence
  Synthetic oligonucleotide
cttagctccaattttggtgcaatttca

SEQ ID NO: 1152 - DNA, 27 bp, Artificial Sequence
  Synthetic oligonucleotide
cttagctccaattttggtgcaatttca

SEQ ID NO: 1153 - DNA, 27 bp, Artificial Sequence
  Synthetic oligonucleotide
cttagctccaattttggtgcaatttca

SEQ ID NO: 1154 - DNA, 27 bp, Artificial Sequence
  Synthetic oligonucleotide
cttagctccaattttggtgcaatttca

SEQ ID NO: 1155 - DNA, 27 bp, Artificial Sequence
  Synthetic oligonucleotide
cttagctccaattttggtgcaatttca

SEQ ID NO: 1156 - DNA, 27 bp, Artificial Sequence
  Synthetic oligonucleotide
cttagctccaattttggtgcaatttca

SEQ ID NO: 1157 - DNA, 25 bp, Artificial Sequence
  Synthetic oligonucleotide
gctccaattttggtgcaatttcaag

SEQ ID NO: 1158 - DNA, 25 bp, Artificial Sequence
  Synthetic oligonucleotide
gctccaattttggtgcaatttcaag

SEQ ID NO: 1159 - DNA, 25 bp, Artificial Sequence
  Synthetic oligonucleotide
gctccaattttggtgcaatttcaag

SEQ ID NO: 1160 - DNA, 25 bp, Artificial Sequence
  Synthetic oligonucleotide
gctccaattttggtgcaatttcaag

SEQ ID NO: 1161 - DNA, 25 bp, Artificial Sequence
  Synthetic oligonucleotide
gctccaattttggtgcaatttcaag

SEQ ID NO: 1162 - DNA, 25 bp, Artificial Sequence
  Synthetic oligonucleotide
gctccaattttggtgcaatttcaag

SEQ ID NO: 1163 - DNA, 25 bp, Artificial Sequence
  Synthetic oligonucleotide
gctccaattttggtgcaatttcaag

SEQ ID NO: 1164 - DNA, 25 bp, Artificial Sequence
  Synthetic oligonucleotide
gctccaattttggtgcaatttcaag

SEQ ID NO: 1165 - DNA, 26 bp, Artificial Sequence
  Synthetic oligonucleotide
gctccaattttggtgcaatttcaagt

SEQ ID NO: 1166 - DNA, 26 bp, Artificial Sequence
  Synthetic oligonucleotide
gctccaattttggtgcaatttcaagt

SEQ ID NO: 1167 - DNA, 26 bp, Artificial Sequence
  Synthetic oligonucleotide
gctccaattttggtgcaatttcaagt

SEQ ID NO: 1168 - DNA, 26 bp, Artificial Sequence
  Synthetic oligonucleotide
gctccaattttggtgcaatttcaagt

SEQ ID NO: 1169 - DNA, 25 bp, Artificial Sequence
  Synthetic oligonucleotide
gctccaattttggtgcaatttcaag

SEQ ID NO: 1170 - DNA, 26 bp, Artificial Sequence
  Synthetic oligonucleotide
gctccaattttggtgcaatttcaagt

SEQ ID NO: 1171 - DNA, 26 bp, Artificial Sequence
  Synthetic oligonucleotide
gctccaattttggtgcaatttcaagt

SEQ ID NO: 1172 - DNA, 26 bp, Artificial Sequence
  Synthetic oligonucleotide
tccaattttggtgcaatttcaagtgt

SEQ ID NO: 1173 - DNA, 26 bp, Artificial Sequence
  Synthetic oligonucleotide
tccaattttggtgcaatttcaagtgt

SEQ ID NO: 1174 - DNA, 26 bp, Artificial Sequence
  Synthetic oligonucleotide
tccaattttggtgcaatttcaagtgt

SEQ ID NO: 1175 - DNA, 26 bp, Artificial Sequence
  Synthetic oligonucleotide
tccaattttggtgcaatttcaagtgt

SEQ ID NO: 1176 - DNA, 26 bp, Artificial Sequence
  Synthetic oligonucleotide
tccaattttggtgcaatttcaagtgt

SEQ ID NO: 1177 - DNA, 26 bp, Artificial Sequence
  Synthetic oligonucleotide
tccaattttggtgcaatttcaagtgt

SEQ ID NO: 1178 - DNA, 26 bp, Artificial Sequence
  Synthetic oligonucleotide
tccaattttggtgcaatttcaagtgt

SEQ ID NO: 1179 - DNA, 27 bp, Artificial Sequence
  Synthetic oligonucleotide
tccaattttggtgcaatttcaagtgtt

SEQ ID NO: 1180 - DNA, 27 bp, Artificial Sequence
  Synthetic oligonucleotide
tccaattttggtgcaatttcaagtgtt

SEQ ID NO: 1181 - DNA, 27 bp, Artificial Sequence
  Synthetic oligonucleotide
tccaattttggtgcaatttcaagtgtt

SEQ ID NO: 1182 - DNA, 27 bp, Artificial Sequence
  Synthetic oligonucleotide
tccaattttggtgcaatttcaagtgtt

SEQ ID NO: 1183 - DNA, 27 bp, Artificial Sequence
  Synthetic oligonucleotide
tccaattttggtgcaatttcaagtgtt

SEQ ID NO: 1184 - DNA, 26 bp, Artificial Sequence
  Synthetic oligonucleotide
tccaattttggtgcaatttcaagtgt

SEQ ID NO: 1185 - DNA, 27 bp, Artificial Sequence
  Synthetic oligonucleotide
tccaattttggtgcaatttcaagtgtt

SEQ ID NO: 1186 - DNA, 27 bp, Artificial Sequence
  Synthetic oligonucleotide
tccaattttggtgcaatttcaagtgtt

SEQ ID NO: 1187 - DNA, 31 bp, Artificial Sequence; identical to SEQ ID NO: 328
  Synthetic oligonucleotide

SEQ ID NO: 1188 - DNA, 30 bp, Artificial Sequence; identical to SEQ ID NO: 753
  Synthetic oligonucleotide

SEQ ID NO: 1189 - DNA, 30 bp, Artificial Sequence; identical to SEQ ID NO: 753
  Synthetic oligonucleotide

SEQ ID NO: 1190 - DNA, 30 bp, Artificial Sequence; identical to SEQ ID NO: 753
  Synthetic oligonucleotide

SEQ ID NO: 1191 - DNA, 30 bp, Artificial Sequence; identical to SEQ ID NO: 753
  Synthetic oligonucleotide

SEQ ID NO: 1192 - DNA, 31 bp, Artificial Sequence; identical to SEQ ID NO: 328
  Synthetic oligonucleotide

SEQ ID NO: 1193 - DNA, 31 bp, Artificial Sequence; identical to SEQ ID NO: 328
  Synthetic oligonucleotide

SEQ ID NO: 1194 - DNA, 31 bp, Artificial Sequence; identical to SEQ ID NO: 328
  Synthetic oligonucleotide

SEQ ID NO: 1195 - DNA, 24 bp, Artificial Sequence
  Synthetic oligonucleotide
caactgaaatctatcaggccggta

SEQ ID NO: 1196 - DNA, 32 bp, Artificial Sequence
  Synthetic oligonucleotide
ggttaaaaacaaatgtgtcaatttcaacttca

SEQ ID NO: 1197 - DNA, 25 bp, Artificial Sequence
  Synthetic oligonucleotide
ggtgcagaaaattcagttgcttact

SEQ ID NO: 1198 - DNA, 25 bp, Artificial Sequence
  Synthetic oligonucleotide
ggtgcagaaaattcagttgcttact

SEQ ID NO: 1199 - DNA, 25 bp, Artificial Sequence
  Synthetic oligonucleotide
tgcagaaaattcagttgcttactct

SEQ ID NO: 1200 - DNA, 25 bp, Artificial Sequence
  Synthetic oligonucleotide
gcagaaaattcagttgcttactcta

SEQ ID NO: 1201 - DNA, 25 bp, Artificial Sequence
  Synthetic oligonucleotide
gcagaaaattcagttgcttactcta

SEQ ID NO: 1202 - DNA, 25 bp, Artificial Sequence
  Synthetic oligonucleotide
gcagaaaattcagttgcttactcta

SEQ ID NO: 1203 - DNA, 25 bp, Artificial Sequence
  Synthetic oligonucleotide
gcagaaaattcagttgcttactcta

SEQ ID NO: 1204 - DNA, 26 bp, Artificial Sequence
  Synthetic oligonucleotide
cttggtgcagaaaattcagttgctta

SEQ ID NO: 1205 - DNA, 25 bp, Artificial Sequence
  Synthetic oligonucleotide
cttggtgcagaaaattcagttgctt

SEQ ID NO: 1206 - DNA, 26 bp, Artificial Sequence
  Synthetic oligonucleotide
cttggtgcagaaaattcagttgctta

SEQ ID NO: 1207 - DNA, 26 bp, Artificial Sequence
  Synthetic oligonucleotide
cttggtgcagaaaattcagttgctta

SEQ ID NO: 1208 - DNA, 26 bp, Artificial Sequence
  Synthetic oligonucleotide
cttggtgcagaaaattcagttgctta

SEQ ID NO: 1209 - DNA, 26 bp, Artificial Sequence
  Synthetic oligonucleotide
cttggtgcagaaaattcagttgctta

SEQ ID NO: 1210 - DNA, 26 bp, Artificial Sequence
  Synthetic oligonucleotide
cttggtgcagaaaattcagttgctta

SEQ ID NO: 1211 - DNA, 26 bp, Artificial Sequence
  Synthetic oligonucleotide
cttggtgcagaaaattcagttgctta

SEQ ID NO: 1212 - DNA, 26 bp, Artificial Sequence
  Synthetic oligonucleotide
cttggtgcagaaaattcagttgctta

SEQ ID NO: 1213 - DNA, 26 bp, Artificial Sequence
  Synthetic oligonucleotide
cttggtgcagaaaattcagttgctta

SEQ ID NO: 1214 - DNA, 25 bp, Artificial Sequence
  Synthetic oligonucleotide
cttggtgcagaaaattcagttgctt

SEQ ID NO: 1215 - DNA, 25 bp, Artificial Sequence
  Synthetic oligonucleotide
cttggtgcagaaaattcagttgctt

SEQ ID NO: 1216 - DNA, 25 bp, Artificial Sequence
  Synthetic oligonucleotide
cttggtgcagaaaattcagttgctt

SEQ ID NO: 1217 - DNA, 25 bp, Artificial Sequence
  Synthetic oligonucleotide
cttggtgcagaaaattcagttgctt

SEQ ID NO: 1218 - DNA, 25 bp, Artificial Sequence
  Synthetic oligonucleotide
cttggtgcagaaaattcagttgctt

SEQ ID NO: 1219 - DNA, 25 bp, Artificial Sequence
  Synthetic oligonucleotide
cttggtgcagaaaattcagttgctt

SEQ ID NO: 1220 - DNA, 25 bp, Artificial Sequence
  Synthetic oligonucleotide
cttggtgcagaaaattcagttgctt

SEQ ID NO: 1221 - DNA, 25 bp, Artificial Sequence
  Synthetic oligonucleotide
cttggtgcagaaaattcagttgctt

SEQ ID NO: 1222 - DNA, 25 bp, Artificial Sequence
  Synthetic oligonucleotide
cttggtgcagaaaattcagttgctt

SEQ ID NO: 1223 - DNA, 25 bp, Artificial Sequence
  Synthetic oligonucleotide
ggtgcagaaaattcagttgcttact

SEQ ID NO: 1224 - DNA, 26 bp, Artificial Sequence
  Synthetic oligonucleotide
ggtgcagaaaattcagttgcttactc

SEQ ID NO: 1225 - DNA, 25 bp, Artificial Sequence
  Synthetic oligonucleotide
ggtgcagaaaattcagttgcttact

SEQ ID NO: 1226 - DNA, 25 bp, Artificial Sequence
  Synthetic oligonucleotide
ggtgcagaaaattcagttgcttact

SEQ ID NO: 1227 - DNA, 25 bp, Artificial Sequence
  Synthetic oligonucleotide
ggtgcagaaaattcagttgcttact

SEQ ID NO: 1228 - DNA, 25 bp, Artificial Sequence
  Synthetic oligonucleotide
ggtgcagaaaattcagttgcttact

SEQ ID NO: 1229 - DNA, 26 bp, Artificial Sequence
  Synthetic oligonucleotide
ggtgcagaaaattcagttgcttactc

SEQ ID NO: 1230 - DNA, 26 bp, Artificial Sequence
  Synthetic oligonucleotide
ggtgcagaaaattcagttgcttactc

SEQ ID NO: 1231 - DNA, 26 bp, Artificial Sequence
  Synthetic oligonucleotide
ggtgcagaaaattcagttgcttactc

SEQ ID NO: 1232 - DNA, 26 bp, Artificial Sequence
  Synthetic oligonucleotide
ggtgcagaaaattcagttgcttactc

SEQ ID NO: 1233 - DNA, 26 bp, Artificial Sequence
  Synthetic oligonucleotide
ggtgcagaaaattcagttgcttactc

SEQ ID NO: 1234 - DNA, 26 bp, Artificial Sequence
  Synthetic oligonucleotide
ggtgcagaaaattcagttgcttactc

SEQ ID NO: 1235 - DNA, 28 bp, Artificial Sequence
  Synthetic oligonucleotide
ggtgcagaaaattcagttgcttactcta

SEQ ID NO: 1236 - DNA, 28 bp, Artificial Sequence
  Synthetic oligonucleotide
ggtgcagaaaattcagttgcttactcta

SEQ ID NO: 1237 - DNA, 28 bp, Artificial Sequence
  Synthetic oligonucleotide
ggtgcagaaaattcagttgcttactcta

SEQ ID NO: 1238 - DNA, 28 bp, Artificial Sequence
  Synthetic oligonucleotide
ggtgcagaaaattcagttgcttactcta

SEQ ID NO: 1239 - DNA, 26 bp, Artificial Sequence
  Synthetic oligonucleotide
ggtgcagaaaattcagttgcttactc

SEQ ID NO: 1240 - DNA, 26 bp, Artificial Sequence
  Synthetic oligonucleotide
ggtgcagaaaattcagttgcttactc

SEQ ID NO: 1241 - DNA, 25 bp, Artificial Sequence
  Synthetic oligonucleotide
ggtgcagaaaattcagttgcttact

SEQ ID NO: 1242 - DNA, 25 bp, Artificial Sequence
  Synthetic oligonucleotide
ggtgcagaaaattcagttgcttact

SEQ ID NO: 1243 - DNA, 25 bp, Artificial Sequence
  Synthetic oligonucleotide
ggtgcagaaaattcagttgcttact

SEQ ID NO: 1244 - DNA, 25 bp, Artificial Sequence
  Synthetic oligonucleotide
ggtgcagaaaattcagttgcttact

SEQ ID NO: 1245 - DNA, 25 bp, Artificial Sequence
  Synthetic oligonucleotide
ggtgcagaaaattcagttgcttact

SEQ ID NO: 1246 - DNA, 28 bp, Artificial Sequence
  Synthetic oligonucleotide
gtgcagaaaattcagttgcttactctaa

SEQ ID NO: 1247 - DNA, 28 bp, Artificial Sequence
  Synthetic oligonucleotide
gtgcagaaaattcagttgcttactctaa

SEQ ID NO: 1248 - DNA, 28 bp, Artificial Sequence
  Synthetic oligonucleotide
gtgcagaaaattcagttgcttactctaa

SEQ ID NO: 1249 - DNA, 28 bp, Artificial Sequence
  Synthetic oligonucleotide
gtgcagaaaattcagttgcttactctaa

SEQ ID NO: 1250 - DNA, 26 bp, Artificial Sequence
  Synthetic oligonucleotide
gtgcagaaaattcagttgcttactct

SEQ ID NO: 1251 - DNA, 26 bp, Artificial Sequence
  Synthetic oligonucleotide
gtgcagaaaattcagttgcttactct

SEQ ID NO: 1252 - DNA, 26 bp, Artificial Sequence
  Synthetic oligonucleotide
gtgcagaaaattcagttgcttactct

SEQ ID NO: 1253 - DNA, 26 bp, Artificial Sequence
  Synthetic oligonucleotide
gtgcagaaaattcagttgcttactct

SEQ ID NO: 1254 - DNA, 26 bp, Artificial Sequence
  Synthetic oligonucleotide
gtgcagaaaattcagttgcttactct

SEQ ID NO: 1255 - DNA, 26 bp, Artificial Sequence
  Synthetic oligonucleotide
gtgcagaaaattcagttgcttactct

SEQ ID NO: 1256 - DNA, 26 bp, Artificial Sequence
  Synthetic oligonucleotide
gtgcagaaaattcagttgcttactct

SEQ ID NO: 1257 - DNA, 26 bp, Artificial Sequence
  Synthetic oligonucleotide
gtgcagaaaattcagttgcttactct

SEQ ID NO: 1258 - DNA, 26 bp, Artificial Sequence
  Synthetic oligonucleotide
gtgcagaaaattcagttgcttactct

SEQ ID NO: 1259 - DNA, 26 bp, Artificial Sequence
  Synthetic oligonucleotide
ttggtgcagaaaattcagttgcttac

SEQ ID NO: 1260 - DNA, 26 bp, Artificial Sequence
  Synthetic oligonucleotide
ttggtgcagaaaattcagttgcttac

SEQ ID NO: 1261 - DNA, 26 bp, Artificial Sequence
  Synthetic oligonucleotide
ttggtgcagaaaattcagttgcttac

SEQ ID NO: 1262 - DNA, 26 bp, Artificial Sequence
  Synthetic oligonucleotide
ttggtgcagaaaattcagttgcttac

SEQ ID NO: 1263 - DNA, 26 bp, Artificial Sequence
  Synthetic oligonucleotide
ttggtgcagaaaattcagttgcttac

SEQ ID NO: 1264 - DNA, 26 bp, Artificial Sequence
  Synthetic oligonucleotide
ttggtgcagaaaattcagttgcttac

SEQ ID NO: 1265 - DNA, 26 bp, Artificial Sequence
  Synthetic oligonucleotide
ttggtgcagaaaattcagttgcttac

SEQ ID NO: 1266 - DNA, 26 bp, Artificial Sequence
  Synthetic oligonucleotide
ttggtgcagaaaattcagttgcttac

SEQ ID NO: 1267 - DNA, 26 bp, Artificial Sequence
  Synthetic oligonucleotide
ttggtgcagaaaattcagttgcttac

SEQ ID NO: 1268 - DNA, 31 bp, Artificial Sequence
  Synthetic oligonucleotide
ttgcttactctaataactctattgccatacc

SEQ ID NO: 1269 - DNA, 29 bp, Artificial Sequence
  Synthetic oligonucleotide
gtttgataaccctgtcctaccatttaatg

SEQ ID NO: 1270 - DNA, 29 bp, Artificial Sequence
  Synthetic oligonucleotide
gtttgataaccctgtcctaccatttaatg

SEQ ID NO: 1271 - DNA, 26 bp, Artificial Sequence
  Synthetic oligonucleotide
ttgatttaggtgacatctctggcatt

SEQ ID NO: 1272 - DNA, 26 bp, Artificial Sequence
  Synthetic oligonucleotide
tggtgttgaaggttttaattgttact

SEQ ID NO: 1273 - DNA, 30 bp, Artificial Sequence; identical to SEQ ID NO: 538
  Synthetic oligonucleotide

SEQ ID NO: 1274 - DNA, 26 bp, Artificial Sequence
  Synthetic oligonucleotide
ttgatttaggtgacatctctggcatt

SEQ ID NO: 1275 - DNA, 26 bp, Artificial Sequence
  Synthetic oligonucleotide
ttgatttaggtgacatctctggcatt

SEQ ID NO: 1276 - DNA, 28 bp, Artificial Sequence
  Synthetic oligonucleotide
acttaaaagtggaaaatgatgcggaatt

SEQ ID NO: 1277 - DNA, 28 bp, Artificial Sequence
  Synthetic oligonucleotide
acttaaaagtggaaaatgatgcggaatt

SEQ ID NO: 1278 - DNA, 25 bp, Artificial Sequence
  Synthetic oligonucleotide
ggccagtaactttagcttgttttgt

SEQ ID NO: 1279 - DNA, 27 bp, Artificial Sequence
  Synthetic oligonucleotide
aggacttgttcttacctttcttttcca

SEQ ID NO: 1280 - DNA, 27 bp, Artificial Sequence
  Synthetic oligonucleotide
aggacttgttcttacctttcttttcca

SEQ ID NO: 1281 - DNA, 24 bp, Artificial Sequence
  Synthetic oligonucleotide
tccaatgttacttggttccatgct

SEQ ID NO: 1282 - DNA, 31 bp, Artificial Sequence; identical to SEQ ID NO: 606
  Synthetic oligonucleotide

SEQ ID NO: 1283 - DNA, 31 bp, Artificial Sequence; identical to SEQ ID NO: 606
  Synthetic oligonucleotide

SEQ ID NO: 1284 - DNA, 29 bp, Artificial Sequence
  Synthetic oligonucleotide
gatccatttttgggtgtttattaccacaa

SEQ ID NO: 1285 - DNA, 29 bp, Artificial Sequence
  Synthetic oligonucleotide
gatccatttttgggtgtttattaccacaa

SEQ ID NO: 1286 - DNA, 30 bp, Artificial Sequence; identical to SEQ ID NO: 407
  Synthetic oligonucleotide

SEQ ID NO: 1287 - DNA, 30 bp, Artificial Sequence; identical to SEQ ID NO: 407
  Synthetic oligonucleotide

SEQ ID NO: 1288 - DNA, 31 bp, Artificial Sequence; identical to SEQ ID NO: 606
  Synthetic oligonucleotide

SEQ ID NO: 1289 - DNA, 31 bp, Artificial Sequence; identical to SEQ ID NO: 606
  Synthetic oligonucleotide

SEQ ID NO: 1290 - DNA, 30 bp, Artificial Sequence; identical to SEQ ID NO: 412
  Synthetic oligonucleotide

SEQ ID NO: 1291 - DNA, 25 bp, Artificial Sequence
  Synthetic oligonucleotide
tcttgattctaaggttggtggtaat

SEQ ID NO: 1292 - DNA, 30 bp, Artificial Sequence; identical to SEQ ID NO: 412
  Synthetic oligonucleotide

SEQ ID NO: 1293 - DNA, 31 bp, Artificial Sequence; identical to SEQ ID NO: 606
  Synthetic oligonucleotide

SEQ ID NO: 1294 - DNA, 31 bp, Artificial Sequence; identical to SEQ ID NO: 606
  Synthetic oligonucleotide

SEQ ID NO: 1295 - DNA, 25 bp, Artificial Sequence
  Synthetic oligonucleotide
tgcagacattgtggaagaagctaaa

SEQ ID NO: 1296 - DNA, 28 bp, Artificial Sequence
  Synthetic oligonucleotide
tgagttaacaggacacatgttagacatg

SEQ ID NO: 1297 - DNA, 28 bp, Artificial Sequence
  Synthetic oligonucleotide
tgagttaacaggacacatgttagacatg

SEQ ID NO: 1298 - DNA, 28 bp, Artificial Sequence
  Synthetic oligonucleotide
tgagttaacaggacacatgttagacatg

SEQ ID NO: 1299 - DNA, 25 bp, Artificial Sequence
  Synthetic oligonucleotide
gcgttgttcgttctatgaagacttt

SEQ ID NO: 1300 - DNA, 25 bp, Artificial Sequence
  Synthetic oligonucleotide
gcgttgttcgttctatgaagacttt

SEQ ID NO: 1301 - DNA, 25 bp, Artificial Sequence
  Synthetic oligonucleotide
gcgttgttcgttctatgaagacttt

SEQ ID NO: 1302 - DNA, 22 bp, Artificial Sequence
  Synthetic oligonucleotide
cgagcttggcactgatccttat

SEQ ID NO: 1303 - DNA, 22 bp, Artificial Sequence
  Synthetic oligonucleotide
cgagcttggcactgatccttat

SEQ ID NO: 1304 - DNA, 22 bp, Artificial Sequence
  Synthetic oligonucleotide
cgagcttggcactgatccttat

SEQ ID NO: 1305-2000 - skipped (696 entries)

SEQ ID NO: 2001 - DNA, 25 bp, Artificial Sequence
  Synthetic oligonucleotide
catctacagcaaaagcacagaaaga

SEQ ID NO: 2002 - DNA, 28 bp, Artificial Sequence
  Synthetic oligonucleotide
ggactcagtattgatttctgttcaccaa

SEQ ID NO: 2003 - DNA, 22 bp, Artificial Sequence
  Synthetic oligonucleotide
gcagcattgttagcaggattgc

SEQ ID NO: 2004 - DNA, 22 bp, Artificial Sequence
  Synthetic oligonucleotide
gcagcattgttagcaggattgc

SEQ ID NO: 2005 - DNA, 22 bp, Artificial Sequence
  Synthetic oligonucleotide
gcagcattgttagcaggattgc

SEQ ID NO: 2006 - DNA, 25 bp, Artificial Sequence
  Synthetic oligonucleotide
caagggacactattaacagcagcta

SEQ ID NO: 2007 - DNA, 22 bp, Artificial Sequence
  Synthetic oligonucleotide
gggtgcatttcgctgattttgg

SEQ ID NO: 2008 - DNA, 25 bp, Artificial Sequence
  Synthetic oligonucleotide
attgtatgctttagtggcagtacgt

SEQ ID NO: 2009 - DNA, 26 bp, Artificial Sequence
  Synthetic oligonucleotide
tgctgacatcataacaaaaggtgact

SEQ ID NO: 2010 - DNA, 26 bp, Artificial Sequence
  Synthetic oligonucleotide
tgctgacatcataacaaaaggtgact

SEQ ID NO: 2011 - DNA, 26 bp, Artificial Sequence
  Synthetic oligonucleotide
tgctgacatcataacaaaaggtgact

SEQ ID NO: 2012 - DNA, 21 bp, Artificial Sequence
  Synthetic oligonucleotide
gcaaagcaagagcagcatcac

SEQ ID NO: 2013 - DNA, 20 bp, Artificial Sequence
  Synthetic oligonucleotide
gtctctgcggtaaggcttga

SEQ ID NO: 2014 - DNA, 22 bp, Artificial Sequence
  Synthetic oligonucleotide
gggtgcatttcgctgattttgg

SEQ ID NO: 2015 - DNA, 22 bp, Artificial Sequence
  Synthetic oligonucleotide
gggtgcatttcgctgattttgg

SEQ ID NO: 2016 - DNA, 20 bp, Artificial Sequence
  Synthetic oligonucleotide
gggccgacgttgttttgatc

SEQ ID NO: 2017 - DNA, 20 bp, Artificial Sequence
  Synthetic oligonucleotide
gggccgacgttgttttgatc

SEQ ID NO: 2018 - DNA, 21 bp, Artificial Sequence
  Synthetic oligonucleotide
gcaaagcaagagcagcatcac

SEQ ID NO: 2019 - DNA, 21 bp, Artificial Sequence
  Synthetic oligonucleotide
gcaaagcaagagcagcatcac

SEQ ID NO: 2020 - DNA, 21 bp, Artificial Sequence
  Synthetic oligonucleotide
ccattgccagccattctagca

SEQ ID NO: 2021 - DNA, 21 bp, Artificial Sequence
  Synthetic oligonucleotide
ccattgccagccattctagca

SEQ ID NO: 2022 - DNA, 24 bp, Artificial Sequence
  Synthetic oligonucleotide
caggaagaagagtcacagtttgct

SEQ ID NO: 2023 - DNA, 23 bp, Artificial Sequence
  Synthetic oligonucleotide
ggtgttaattggaacgccttgtc

SEQ ID NO: 2024 - DNA, 21 bp, Artificial Sequence
  Synthetic oligonucleotide
ccttgtgtggtctgcatgagt

SEQ ID NO: 2025 - DNA, 23 bp, Artificial Sequence
  Synthetic oligonucleotide
ttcttgaactgttgcgactacgt

SEQ ID NO: 2026 - DNA, 21 bp, Artificial Sequence
  Synthetic oligonucleotide
ccattgccagccattctagca

SEQ ID NO: 2027 - DNA, 21 bp, Artificial Sequence
  Synthetic oligonucleotide
ccattgccagccattctagca

SEQ ID NO: 2028 - DNA, 29 bp, Artificial Sequence
  Synthetic oligonucleotide
acatcacctaactcacctactgtcttatt

SEQ ID NO: 2029 - DNA, 25 bp, Artificial Sequence
  Synthetic oligonucleotide
accgtctacaacatgcacataactt

SEQ ID NO: 2030 - DNA, 30 bp, Artificial Sequence
  Synthetic oligonucleotide
acacctgagtagttagaagtaacagagatt

SEQ ID NO: 2031 - DNA, 25 bp, Artificial Sequence
  Synthetic oligonucleotide
tggtgctgacatcataacaaaaggt

SEQ ID NO: 2032 - DNA, 25 bp, Artificial Sequence
  Synthetic oligonucleotide
tggtgctgacatcataacaaaaggt

SEQ ID NO: 2033 - DNA, 27 bp, Artificial Sequence
  Synthetic oligonucleotide
cagtaacattatcgctaccaacacatg

SEQ ID NO: 2034 - DNA, 25 bp, Artificial Sequence
  Synthetic oligonucleotide
catctacagcaaaagcacagaaaga

SEQ ID NO: 2035 - DNA, 25 bp, Artificial Sequence
  Synthetic oligonucleotide
catctacagcaaaagcacagaaaga

SEQ ID NO: 2036 - DNA, 30 bp, Artificial Sequence
  Synthetic oligonucleotide
acatcacctaactcacctactgtcttatta

SEQ ID NO: 2037 - DNA, 29 bp, Artificial Sequence
  Synthetic oligonucleotide
acatcacctaactcacctactgtcttatt

SEQ ID NO: 2038 - DNA, 30 bp, Artificial Sequence
  Synthetic oligonucleotide
catcacctaactcacctactgtcttattac

SEQ ID NO: 2039 - DNA, 30 bp, Artificial Sequence; identical to SEQ ID NO: 2036
  Synthetic oligonucleotide

SEQ ID NO: 2040 - DNA, 29 bp, Artificial Sequence
  Synthetic oligonucleotide
acatcacctaactcacctactgtcttatt

SEQ ID NO: 2041 - DNA, 30 bp, Artificial Sequence; identical to SEQ ID NO: 2038
  Synthetic oligonucleotide

SEQ ID NO: 2042 - DNA, 30 bp, Artificial Sequence; identical to SEQ ID NO: 2036
  Synthetic oligonucleotide

SEQ ID NO: 2043 - DNA, 29 bp, Artificial Sequence
  Synthetic oligonucleotide
acatcacctaactcacctactgtcttatt

SEQ ID NO: 2044 - DNA, 30 bp, Artificial Sequence
  Synthetic oligonucleotide
atcacctaactcacctactgtcttattaca

SEQ ID NO: 2045 - DNA, 30 bp, Artificial Sequence; identical to SEQ ID NO: 2038
  Synthetic oligonucleotide

SEQ ID NO: 2046 - DNA, 30 bp, Artificial Sequence; identical to SEQ ID NO: 2036
  Synthetic oligonucleotide

SEQ ID NO: 2047 - DNA, 29 bp, Artificial Sequence
  Synthetic oligonucleotide
acatcacctaactcacctactgtcttatt

SEQ ID NO: 2048 - DNA, 30 bp, Artificial Sequence; identical to SEQ ID NO: 2044
  Synthetic oligonucleotide

SEQ ID NO: 2049 - DNA, 30 bp, Artificial Sequence; identical to SEQ ID NO: 2038
  Synthetic oligonucleotide

SEQ ID NO: 2050 - DNA, 30 bp, Artificial Sequence; identical to SEQ ID NO: 2036
  Synthetic oligonucleotide

SEQ ID NO: 2051 - DNA, 29 bp, Artificial Sequence
  Synthetic oligonucleotide
acatcacctaactcacctactgtcttatt

SEQ ID NO: 2052 - DNA, 30 bp, Artificial Sequence; identical to SEQ ID NO: 2036
  Synthetic oligonucleotide

SEQ ID NO: 2053 - DNA, 29 bp, Artificial Sequence
  Synthetic oligonucleotide
acatcacctaactcacctactgtcttatt

SEQ ID NO: 2054 - DNA, 30 bp, Artificial Sequence; identical to SEQ ID NO: 2036
  Synthetic oligonucleotide

SEQ ID NO: 2055 - DNA, 29 bp, Artificial Sequence
  Synthetic oligonucleotide
acatcacctaactcacctactgtcttatt

SEQ ID NO: 2056 - DNA, 30 bp, Artificial Sequence; identical to SEQ ID NO: 2038
  Synthetic oligonucleotide

SEQ ID NO: 2057 - DNA, 30 bp, Artificial Sequence; identical to SEQ ID NO: 2038
  Synthetic oligonucleotide

SEQ ID NO: 2058 - DNA, 30 bp, Artificial Sequence; identical to SEQ ID NO: 2044
  Synthetic oligonucleotide

SEQ ID NO: 2059 - DNA, 30 bp, Artificial Sequence; identical to SEQ ID NO: 2038
  Synthetic oligonucleotide

SEQ ID NO: 2060 - DNA, 25 bp, Artificial Sequence
  Synthetic oligonucleotide
accgtctacaacatgcacataactt

SEQ ID NO: 2061 - DNA, 29 bp, Artificial Sequence
  Synthetic oligonucleotide
gacaatgacatgaaatctttaacgttcca

SEQ ID NO: 2062 - DNA, 29 bp, Artificial Sequence
  Synthetic oligonucleotide
gacaatgacatgaaatctttaacgttcca

SEQ ID NO: 2063 - DNA, 30 bp, Artificial Sequence; identical to SEQ ID NO: 2030
  Synthetic oligonucleotide

SEQ ID NO: 2064 - DNA, 30 bp, Artificial Sequence; identical to SEQ ID NO: 2030
  Synthetic oligonucleotide

SEQ ID NO: 2065 - DNA, 25 bp, Artificial Sequence
  Synthetic oligonucleotide
cctgacccgggtaagtggttatata

SEQ ID NO: 2066 - DNA, 34 bp, Artificial Sequence
  Synthetic oligonucleotide
tgcttctcattagagataatagatggtagaatgt

SEQ ID NO: 2067 - DNA, 25 bp, Artificial Sequence
  Synthetic oligonucleotide
ctatagcttgtaaggttgccctgtt

SEQ ID NO: 2068 - DNA, 26 bp, Artificial Sequence
  Synthetic oligonucleotide
tctccatttataacagcagcgtacaa

SEQ ID NO: 2069 - DNA, 21 bp, Artificial Sequence
  Synthetic oligonucleotide
agaacacacagcctccaaagg

SEQ ID NO: 2070 - DNA, 27 bp, Artificial Sequence
  Synthetic oligonucleotide
gagagtaagactactgatgtgcacttt

SEQ ID NO: 2071 - DNA, 23 bp, Artificial Sequence
  Synthetic oligonucleotide
gcaccaccaaaggattcttgatc

SEQ ID NO: 2072 - DNA, 23 bp, Artificial Sequence
  Synthetic oligonucleotide
gcaccaccaaaggattcttgatc

SEQ ID NO: 2073 - DNA, 25 bp, Artificial Sequence
  Synthetic oligonucleotide
ccctggagtgtagaatacttttgca

SEQ ID NO: 2074 - DNA, 22 bp, Artificial Sequence
  Synthetic oligonucleotide
cagtttcaagagtgcgggagaa

SEQ ID NO: 2075 - DNA, 24 bp, Artificial Sequence
  Synthetic oligonucleotide
gagcagaagggtagtagagagcta

SEQ ID NO: 2076 - DNA, 24 bp, Artificial Sequence
  Synthetic oligonucleotide
ttgtccagtcacatgttgcaattg

SEQ ID NO: 2077 - DNA, 21 bp, Artificial Sequence
  Synthetic oligonucleotide
ctttgagcgtttctgctgcaa

SEQ ID NO: 2078 - DNA, 27 bp, Artificial Sequence
  Synthetic oligonucleotide
gagtgttgggtataagccagtaattct

SEQ ID NO: 2079 - DNA, 25 bp, Artificial Sequence
  Synthetic oligonucleotide
caaagcactcacagtgtcaacaatt

SEQ ID NO: 2080 - DNA, 27 bp, Artificial Sequence
  Synthetic oligonucleotide
ggtgtgtggaatgcatgtttatttaca

SEQ ID NO: 2081 - DNA, 20 bp, Artificial Sequence
  Synthetic oligonucleotide
tcacaacctggagcattgca

SEQ ID NO: 2082 - DNA, 27 bp, Artificial Sequence
  Synthetic oligonucleotide
cagtaacattatcgctaccaacacatg

SEQ ID NO: 2083 - DNA, 27 bp, Artificial Sequence
  Synthetic oligonucleotide
cagtaacattatcgctaccaacacatg

SEQ ID NO: 2084 - DNA, 30 bp, Artificial Sequence
  Synthetic oligonucleotide
ctttgcattttgtaaagattaggcatagca

SEQ ID NO: 2085 - DNA, 24 bp, Artificial Sequence
  Synthetic oligonucleotide
tggcctgttaattgcagatgaaac

SEQ ID NO: 2086 - DNA, 31 bp, Artificial Sequence
  Synthetic oligonucleotide
tctatagagacactcataaagtctgtgttgt

SEQ ID NO: 2087 - DNA, 25 bp, Artificial Sequence
  Synthetic oligonucleotide
gcttgtatcggtatcgttgcagtag

SEQ ID NO: 2088 - DNA, 24 bp, Artificial Sequence
  Synthetic oligonucleotide
gcttgtatcggtatcgttgcagta

SEQ ID NO: 2089 - DNA, 27 bp, Artificial Sequence
  Synthetic oligonucleotide
ctgctatagtaacctgaaagtcaacga

SEQ ID NO: 2090 - DNA, 27 bp, Artificial Sequence
  Synthetic oligonucleotide
ctgctatagtaacctgaaagtcaacga

SEQ ID NO: 2091 - DNA, 40 bp, Artificial Sequence
  Synthetic oligonucleotide
gtcctcataataattagtaatatctctgctatagtaacct

SEQ ID NO: 2092 - DNA, 27 bp, Artificial Sequence
  Synthetic oligonucleotide
gcagaaaggctaaaaagcacaaataga

SEQ ID NO: 2093 - DNA, 25 bp, Artificial Sequence
  Synthetic oligonucleotide
ggacacgggtcatcaactacatatg

SEQ ID NO: 2094 - DNA, 23 bp, Artificial Sequence
  Synthetic oligonucleotide
acacgggtcatcaactacatatg

SEQ ID NO: 2095 - DNA, 23 bp, Artificial Sequence
  Synthetic oligonucleotide
acacgggtcatcaactacatatg

SEQ ID NO: 2096 - DNA, 23 bp, Artificial Sequence
  Synthetic oligonucleotide
acacgggtcatcaactacatatg

SEQ ID NO: 2097 - DNA, 23 bp, Artificial Sequence
  Synthetic oligonucleotide
acacgggtcatcaactacatatg

SEQ ID NO: 2098 - DNA, 23 bp, Artificial Sequence
  Synthetic oligonucleotide
acacgggtcatcaactacatatg

SEQ ID NO: 2099 - DNA, 23 bp, Artificial Sequence
  Synthetic oligonucleotide
acacgggtcatcaactacatatg

SEQ ID NO: 2100 - DNA, 23 bp, Artificial Sequence
  Synthetic oligonucleotide
acacgggtcatcaactacatatg

SEQ ID NO: 2101 - DNA, 23 bp, Artificial Sequence
  Synthetic oligonucleotide
acacgggtcatcaactacatatg

SEQ ID NO: 2102 - DNA, 25 bp, Artificial Sequence
  Synthetic oligonucleotide
tggaagcaaaataaacaccatcatt

SEQ ID NO: 2103 - DNA, 24 bp, Artificial Sequence
  Synthetic oligonucleotide
aggacacgggtcatcaactacata

SEQ ID NO: 2104 - DNA, 25 bp, Artificial Sequence
  Synthetic oligonucleotide
aggacacgggtcatcaactacatat

SEQ ID NO: 2105 - DNA, 23 bp, Artificial Sequence
  Synthetic oligonucleotide
gaagtgaataggacacgggtcat

SEQ ID NO: 2106 - DNA, 24 bp, Artificial Sequence
  Synthetic oligonucleotide
gaagtgaataggacacgggtcatc

SEQ ID NO: 2107 - DNA, 25 bp, Artificial Sequence
  Synthetic oligonucleotide
gaataggacacgggtcatcaactac

SEQ ID NO: 2108 - DNA, 23 bp, Artificial Sequence
  Synthetic oligonucleotide
gaataggacacgggtcatcaact

SEQ ID NO: 2109 - DNA, 21 bp, Artificial Sequence
  Synthetic oligonucleotide
ggacacgggtcatcaactaca

SEQ ID NO: 2110 - DNA, 22 bp, Artificial Sequence
  Synthetic oligonucleotide
ggacacgggtcatcaactacat

SEQ ID NO: 2111 - DNA, 25 bp, Artificial Sequence
  Synthetic oligonucleotide
ggacacgggtcatcaactacatatg

SEQ ID NO: 2112 - DNA, 23 bp, Artificial Sequence
  Synthetic oligonucleotide
gtgaataggacacgggtcatcaa

SEQ ID NO: 2113 - DNA, 22 bp, Artificial Sequence
  Synthetic oligonucleotide
gtgaataggacacgggtcatca

SEQ ID NO: 2114 - DNA, 23 bp, Artificial Sequence
  Synthetic oligonucleotide
tgaataggacacgggtcatcaac

SEQ ID NO: 2115 - DNA, 25 bp, Artificial Sequence
  Synthetic oligonucleotide
tgaataggacacgggtcatcaacta

SEQ ID NO: 2116 - DNA, 23 bp, Artificial Sequence
  Synthetic oligonucleotide
agaagtgaataggacacgggtca

SEQ ID NO: 2117 - DNA, 24 bp, Artificial Sequence
  Synthetic oligonucleotide
aggacacgggtcatcaactacata

SEQ ID NO: 2118 - DNA, 25 bp, Artificial Sequence
  Synthetic oligonucleotide
aggacacgggtcatcaactacatat

SEQ ID NO: 2119 - DNA, 23 bp, Artificial Sequence
  Synthetic oligonucleotide
agaagtgaataggacacgggtca

SEQ ID NO: 2120 - DNA, 23 bp, Artificial Sequence
  Synthetic oligonucleotide
gaagtgaataggacacgggtcat

SEQ ID NO: 2121 - DNA, 24 bp, Artificial Sequence
  Synthetic oligonucleotide
gaagtgaataggacacgggtcatc

SEQ ID NO: 2122 - DNA, 25 bp, Artificial Sequence
  Synthetic oligonucleotide
gaataggacacgggtcatcaactac

SEQ ID NO: 2123 - DNA, 23 bp, Artificial Sequence
  Synthetic oligonucleotide
gaataggacacgggtcatcaact

SEQ ID NO: 2124 - DNA, 21 bp, Artificial Sequence
  Synthetic oligonucleotide
ggacacgggtcatcaactaca

SEQ ID NO: 2125 - DNA, 24 bp, Artificial Sequence
  Synthetic oligonucleotide
aggacacgggtcatcaactacata

SEQ ID NO: 2126 - DNA, 22 bp, Artificial Sequence
  Synthetic oligonucleotide
ggacacgggtcatcaactacat

SEQ ID NO: 2127 - DNA, 25 bp, Artificial Sequence
  Synthetic oligonucleotide
aggacacgggtcatcaactacatat

SEQ ID NO: 2128 - DNA, 25 bp, Artificial Sequence
  Synthetic oligonucleotide
ggacacgggtcatcaactacatatg

SEQ ID NO: 2129 - DNA, 23 bp, Artificial Sequence
  Synthetic oligonucleotide
gtgaataggacacgggtcatcaa

SEQ ID NO: 2130 - DNA, 22 bp, Artificial Sequence
  Synthetic oligonucleotide
gtgaataggacacgggtcatca

SEQ ID NO: 2131 - DNA, 23 bp, Artificial Sequence
  Synthetic oligonucleotide
agaagtgaataggacacgggtca

SEQ ID NO: 2132 - DNA, 24 bp, Artificial Sequence
  Synthetic oligonucleotide
aggacacgggtcatcaactacata

SEQ ID NO: 2133 - DNA, 25 bp, Artificial Sequence
  Synthetic oligonucleotide
aggacacgggtcatcaactacatat

SEQ ID NO: 2134 - DNA, 23 bp, Artificial Sequence
  Synthetic oligonucleotide
gaagtgaataggacacgggtcat

SEQ ID NO: 2135 - DNA, 24 bp, Artificial Sequence
  Synthetic oligonucleotide
gaagtgaataggacacgggtcatc

SEQ ID NO: 2136 - DNA, 23 bp, Artificial Sequence
  Synthetic oligonucleotide
tgaataggacacgggtcatcaac

SEQ ID NO: 2137 - DNA, 25 bp, Artificial Sequence
  Synthetic oligonucleotide
tgaataggacacgggtcatcaacta

SEQ ID NO: 2138 - DNA, 25 bp, Artificial Sequence
  Synthetic oligonucleotide
gaataggacacgggtcatcaactac

SEQ ID NO: 2139 - DNA, 23 bp, Artificial Sequence
  Synthetic oligonucleotide
gaataggacacgggtcatcaact

SEQ ID NO: 2140 - DNA, 21 bp, Artificial Sequence
  Synthetic oligonucleotide
ggacacgggtcatcaactaca

SEQ ID NO: 2141 - DNA, 22 bp, Artificial Sequence
  Synthetic oligonucleotide
ggacacgggtcatcaactacat

SEQ ID NO: 2142 - DNA, 25 bp, Artificial Sequence
  Synthetic oligonucleotide
ggacacgggtcatcaactacatatg

SEQ ID NO: 2143 - DNA, 23 bp, Artificial Sequence
  Synthetic oligonucleotide
gtgaataggacacgggtcatcaa

SEQ ID NO: 2144 - DNA, 22 bp, Artificial Sequence
  Synthetic oligonucleotide
gtgaataggacacgggtcatca

SEQ ID NO: 2145 - DNA, 23 bp, Artificial Sequence
  Synthetic oligonucleotide
tgaataggacacgggtcatcaac

SEQ ID NO: 2146 - DNA, 25 bp, Artificial Sequence
  Synthetic oligonucleotide
tgaataggacacgggtcatcaacta

SEQ ID NO: 2147 - DNA, 23 bp, Artificial Sequence
  Synthetic oligonucleotide
gaagtgaataggacacgggtcat

SEQ ID NO: 2148 - DNA, 24 bp, Artificial Sequence
  Synthetic oligonucleotide
gaagtgaataggacacgggtcatc

SEQ ID NO: 2149 - DNA, 25 bp, Artificial Sequence
  Synthetic oligonucleotide
gaataggacacgggtcatcaactac

SEQ ID NO: 2150 - DNA, 23 bp, Artificial Sequence
  Synthetic oligonucleotide
gaataggacacgggtcatcaact

SEQ ID NO: 2151 - DNA, 21 bp, Artificial Sequence
  Synthetic oligonucleotide
ggacacgggtcatcaactaca

SEQ ID NO: 2152 - DNA, 22 bp, Artificial Sequence
  Synthetic oligonucleotide
ggacacgggtcatcaactacat

SEQ ID NO: 2153 - DNA, 25 bp, Artificial Sequence
  Synthetic oligonucleotide
ggacacgggtcatcaactacatatg

SEQ ID NO: 2154 - DNA, 23 bp, Artificial Sequence
  Synthetic oligonucleotide
gtgaataggacacgggtcatcaa

SEQ ID NO: 2155 - DNA, 22 bp, Artificial Sequence
  Synthetic oligonucleotide
gtgaataggacacgggtcatca

SEQ ID NO: 2156 - DNA, 23 bp, Artificial Sequence
  Synthetic oligonucleotide
tgaataggacacgggtcatcaac

SEQ ID NO: 2157 - DNA, 25 bp, Artificial Sequence
  Synthetic oligonucleotide
tgaataggacacgggtcatcaacta

SEQ ID NO: 2158 - DNA, 23 bp, Artificial Sequence
  Synthetic oligonucleotide
gaagtgaataggacacgggtcat

SEQ ID NO: 2159 - DNA, 24 bp, Artificial Sequence
  Synthetic oligonucleotide
gaagtgaataggacacgggtcatc

SEQ ID NO: 2160 - DNA, 23 bp, Artificial Sequence
  Synthetic oligonucleotide
gaataggacacgggtcatcaact

SEQ ID NO: 2161 - DNA, 23 bp, Artificial Sequence
  Synthetic oligonucleotide
gtgaataggacacgggtcatcaa

SEQ ID NO: 2162 - DNA, 22 bp, Artificial Sequence
  Synthetic oligonucleotide
gtgaataggacacgggtcatca

SEQ ID NO: 2163 - DNA, 23 bp, Artificial Sequence
  Synthetic oligonucleotide
tgaataggacacgggtcatcaac

SEQ ID NO: 2164 - DNA, 23 bp, Artificial Sequence
  Synthetic oligonucleotide
agaagtgaataggacacgggtca

SEQ ID NO: 2165 - DNA, 24 bp, Artificial Sequence
  Synthetic oligonucleotide
aggacacgggtcatcaactacata

SEQ ID NO: 2166 - DNA, 25 bp, Artificial Sequence
  Synthetic oligonucleotide
aggacacgggtcatcaactacatat

SEQ ID NO: 2167 - DNA, 23 bp, Artificial Sequence
  Synthetic oligonucleotide
gaagtgaataggacacgggtcat

SEQ ID NO: 2168 - DNA, 24 bp, Artificial Sequence
  Synthetic oligonucleotide
gaagtgaataggacacgggtcatc

SEQ ID NO: 2169 - DNA, 25 bp, Artificial Sequence
  Synthetic oligonucleotide
gaataggacacgggtcatcaactac

SEQ ID NO: 2170 - DNA, 23 bp, Artificial Sequence
  Synthetic oligonucleotide
gaataggacacgggtcatcaact

SEQ ID NO: 2171 - DNA, 24 bp, Artificial Sequence
  Synthetic oligonucleotide
aggacacgggtcatcaactacata

SEQ ID NO: 2172 - DNA, 25 bp, Artificial Sequence
  Synthetic oligonucleotide
aggacacgggtcatcaactacatat

SEQ ID NO: 2173 - DNA, 23 bp, Artificial Sequence
  Synthetic oligonucleotide
gaagtgaataggacacgggtcat

SEQ ID NO: 2174 - DNA, 24 bp, Artificial Sequence
  Synthetic oligonucleotide
gaagtgaataggacacgggtcatc

SEQ ID NO: 2175 - DNA, 25 bp, Artificial Sequence
  Synthetic oligonucleotide
gaataggacacgggtcatcaactac

SEQ ID NO: 2176 - DNA, 23 bp, Artificial Sequence
  Synthetic oligonucleotide
gaataggacacgggtcatcaact

SEQ ID NO: 2177 - DNA, 21 bp, Artificial Sequence
  Synthetic oligonucleotide
ggacacgggtcatcaactaca

SEQ ID NO: 2178 - DNA, 22 bp, Artificial Sequence
  Synthetic oligonucleotide
ggacacgggtcatcaactacat

SEQ ID NO: 2179 - DNA, 25 bp, Artificial Sequence
  Synthetic oligonucleotide
ggacacgggtcatcaactacatatg

SEQ ID NO: 2180 - DNA, 21 bp, Artificial Sequence
  Synthetic oligonucleotide
ggacacgggtcatcaactaca

SEQ ID NO: 2181 - DNA, 22 bp, Artificial Sequence
  Synthetic oligonucleotide
ggacacgggtcatcaactacat

SEQ ID NO: 2182 - DNA, 25 bp, Artificial Sequence
  Synthetic oligonucleotide
ggacacgggtcatcaactacatatg

SEQ ID NO: 2183 - DNA, 23 bp, Artificial Sequence
  Synthetic oligonucleotide
gtgaataggacacgggtcatcaa

SEQ ID NO: 2184 - DNA, 22 bp, Artificial Sequence
  Synthetic oligonucleotide
gtgaataggacacgggtcatca

SEQ ID NO: 2185 - DNA, 23 bp, Artificial Sequence
  Synthetic oligonucleotide
gtgaataggacacgggtcatcaa

SEQ ID NO: 2186 - DNA, 23 bp, Artificial Sequence
  Synthetic oligonucleotide
tgaataggacacgggtcatcaac

SEQ ID NO: 2187 - DNA, 22 bp, Artificial Sequence
  Synthetic oligonucleotide
gtgaataggacacgggtcatca

SEQ ID NO: 2188 - DNA, 25 bp, Artificial Sequence
  Synthetic oligonucleotide
tgaataggacacgggtcatcaacta

SEQ ID NO: 2189 - DNA, 23 bp, Artificial Sequence
  Synthetic oligonucleotide
tgaataggacacgggtcatcaac

SEQ ID NO: 2190 - DNA, 25 bp, Artificial Sequence
  Synthetic oligonucleotide
tgaataggacacgggtcatcaacta

SEQ ID NO: 2191 - DNA, 24 bp, Artificial Sequence
  Synthetic oligonucleotide
aggacacgggtcatcaactacata

SEQ ID NO: 2192 - DNA, 25 bp, Artificial Sequence
  Synthetic oligonucleotide
aggacacgggtcatcaactacatat

SEQ ID NO: 2193 - DNA, 23 bp, Artificial Sequence
  Synthetic oligonucleotide
gaagtgaataggacacgggtcat

SEQ ID NO: 2194 - DNA, 24 bp, Artificial Sequence
  Synthetic oligonucleotide
gaagtgaataggacacgggtcatc

SEQ ID NO: 2195 - DNA, 25 bp, Artificial Sequence
  Synthetic oligonucleotide
gaataggacacgggtcatcaactac

SEQ ID NO: 2196 - DNA, 23 bp, Artificial Sequence
  Synthetic oligonucleotide
gaataggacacgggtcatcaact

SEQ ID NO: 2197 - DNA, 21 bp, Artificial Sequence
  Synthetic oligonucleotide
ggacacgggtcatcaactaca

SEQ ID NO: 2198 - DNA, 22 bp, Artificial Sequence
  Synthetic oligonucleotide
ggacacgggtcatcaactacat

SEQ ID NO: 2199 - DNA, 25 bp, Artificial Sequence
  Synthetic oligonucleotide
ggacacgggtcatcaactacatatg

SEQ ID NO: 2200 - DNA, 23 bp, Artificial Sequence
  Synthetic oligonucleotide
gtgaataggacacgggtcatcaa

SEQ ID NO: 2201 - DNA, 22 bp, Artificial Sequence
  Synthetic oligonucleotide
gtgaataggacacgggtcatca

SEQ ID NO: 2202 - DNA, 23 bp, Artificial Sequence
  Synthetic oligonucleotide
tgaataggacacgggtcatcaac

SEQ ID NO: 2203 - DNA, 25 bp, Artificial Sequence
  Synthetic oligonucleotide
tgaataggacacgggtcatcaacta

SEQ ID NO: 2204 - DNA, 23 bp, Artificial Sequence
  Synthetic oligonucleotide
agaagtgaataggacacgggtca

SEQ ID NO: 2205 - DNA, 24 bp, Artificial Sequence
  Synthetic oligonucleotide
aggacacgggtcatcaactacata

SEQ ID NO: 2206 - DNA, 25 bp, Artificial Sequence
  Synthetic oligonucleotide
aggacacgggtcatcaactacatat

SEQ ID NO: 2207 - DNA, 23 bp, Artificial Sequence
  Synthetic oligonucleotide
gaagtgaataggacacgggtcat

SEQ ID NO: 2208 - DNA, 24 bp, Artificial Sequence
  Synthetic oligonucleotide
gaagtgaataggacacgggtcatc

SEQ ID NO: 2209 - DNA, 25 bp, Artificial Sequence
  Synthetic oligonucleotide
gaataggacacgggtcatcaactac

SEQ ID NO: 2210 - DNA, 23 bp, Artificial Sequence
  Synthetic oligonucleotide
gaataggacacgggtcatcaact

SEQ ID NO: 2211 - DNA, 21 bp, Artificial Sequence
  Synthetic oligonucleotide
ggacacgggtcatcaactaca

SEQ ID NO: 2212 - DNA, 22 bp, Artificial Sequence
  Synthetic oligonucleotide
ggacacgggtcatcaactacat

SEQ ID NO: 2213 - DNA, 25 bp, Artificial Sequence
  Synthetic oligonucleotide
ggacacgggtcatcaactacatatg

SEQ ID NO: 2214 - DNA, 23 bp, Artificial Sequence
  Synthetic oligonucleotide
gtgaataggacacgggtcatcaa

SEQ ID NO: 2215 - DNA, 22 bp, Artificial Sequence
  Synthetic oligonucleotide
gtgaataggacacgggtcatca

SEQ ID NO: 2216 - DNA, 23 bp, Artificial Sequence
  Synthetic oligonucleotide
tgaataggacacgggtcatcaac

SEQ ID NO: 2217 - DNA, 25 bp, Artificial Sequence
  Synthetic oligonucleotide
tgaataggacacgggtcatcaacta

SEQ ID NO: 2218 - DNA, 24 bp, Artificial Sequence
  Synthetic oligonucleotide
aggacacgggtcatcaactacata

SEQ ID NO: 2219 - DNA, 25 bp, Artificial Sequence
  Synthetic oligonucleotide
aggacacgggtcatcaactacatat

SEQ ID NO: 2220 - DNA, 23 bp, Artificial Sequence
  Synthetic oligonucleotide
gaagtgaataggacacgggtcat

SEQ ID NO: 2221 - DNA, 24 bp, Artificial Sequence
  Synthetic oligonucleotide
gaagtgaataggacacgggtcatc

SEQ ID NO: 2222 - DNA, 25 bp, Artificial Sequence
  Synthetic oligonucleotide
gaataggacacgggtcatcaactac

SEQ ID NO: 2223 - DNA, 23 bp, Artificial Sequence
  Synthetic oligonucleotide
gaataggacacgggtcatcaact

SEQ ID NO: 2224 - DNA, 25 bp, Artificial Sequence
  Synthetic oligonucleotide
ggacacgggtcatcaactacatatg

SEQ ID NO: 2225 - DNA, 23 bp, Artificial Sequence
  Synthetic oligonucleotide
gtgaataggacacgggtcatcaa

SEQ ID NO: 2226 - DNA, 22 bp, Artificial Sequence
  Synthetic oligonucleotide
gtgaataggacacgggtcatca

SEQ ID NO: 2227 - DNA, 23 bp, Artificial Sequence
  Synthetic oligonucleotide
tgaataggacacgggtcatcaac

SEQ ID NO: 2228 - DNA, 25 bp, Artificial Sequence
  Synthetic oligonucleotide
tgaataggacacgggtcatcaacta

SEQ ID NO: 2229 - DNA, 23 bp, Artificial Sequence
  Synthetic oligonucleotide
agaagtgaataggacacgggtca

SEQ ID NO: 2230 - DNA, 24 bp, Artificial Sequence
  Synthetic oligonucleotide
aggacacgggtcatcaactacata

SEQ ID NO: 2231 - DNA, 25 bp, Artificial Sequence
  Synthetic oligonucleotide
aggacacgggtcatcaactacatat

SEQ ID NO: 2232 - DNA, 23 bp, Artificial Sequence
  Synthetic oligonucleotide
gaagtgaataggacacgggtcat

SEQ ID NO: 2233 - DNA, 24 bp, Artificial Sequence
  Synthetic oligonucleotide
gaagtgaataggacacgggtcatc

SEQ ID NO: 2234 - DNA, 25 bp, Artificial Sequence
  Synthetic oligonucleotide
gaataggacacgggtcatcaactac

SEQ ID NO: 2235 - DNA, 23 bp, Artificial Sequence
  Synthetic oligonucleotide
gaataggacacgggtcatcaact

SEQ ID NO: 2236 - DNA, 21 bp, Artificial Sequence
  Synthetic oligonucleotide
ggacacgggtcatcaactaca

SEQ ID NO: 2237 - DNA, 22 bp, Artificial Sequence
  Synthetic oligonucleotide
ggacacgggtcatcaactacat

SEQ ID NO: 2238 - DNA, 25 bp, Artificial Sequence
  Synthetic oligonucleotide
ggacacgggtcatcaactacatatg

SEQ ID NO: 2239 - DNA, 23 bp, Artificial Sequence
  Synthetic oligonucleotide
gtgaataggacacgggtcatcaa

SEQ ID NO: 2240 - DNA, 22 bp, Artificial Sequence
  Synthetic oligonucleotide
gtgaataggacacgggtcatca

SEQ ID NO: 2241 - DNA, 23 bp, Artificial Sequence
  Synthetic oligonucleotide
tgaataggacacgggtcatcaac

SEQ ID NO: 2242 - DNA, 25 bp, Artificial Sequence
  Synthetic oligonucleotide
tgaataggacacgggtcatcaacta

SEQ ID NO: 2243 - DNA, 23 bp, Artificial Sequence
  Synthetic oligonucleotide
gaagtgaataggacacgggtcat

SEQ ID NO: 2244 - DNA, 24 bp, Artificial Sequence
  Synthetic oligonucleotide
gaagtgaataggacacgggtcatc

SEQ ID NO: 2245 - DNA, 23 bp, Artificial Sequence
  Synthetic oligonucleotide
gtgaataggacacgggtcatcaa

SEQ ID NO: 2246 - DNA, 22 bp, Artificial Sequence
  Synthetic oligonucleotide
gtgaataggacacgggtcatca

SEQ ID NO: 2247 - DNA, 24 bp, Artificial Sequence
  Synthetic oligonucleotide
aggacacgggtcatcaactacata

SEQ ID NO: 2248 - DNA, 25 bp, Artificial Sequence
  Synthetic oligonucleotide
aggacacgggtcatcaactacatat

SEQ ID NO: 2249 - DNA, 24 bp, Artificial Sequence
  Synthetic oligonucleotide
aggacacgggtcatcaactacata

SEQ ID NO: 2250 - DNA, 25 bp, Artificial Sequence
  Synthetic oligonucleotide
aggacacgggtcatcaactacatat

SEQ ID NO: 2251 - DNA, 23 bp, Artificial Sequence
  Synthetic oligonucleotide
gaagtgaataggacacgggtcat

SEQ ID NO: 2252 - DNA, 24 bp, Artificial Sequence
  Synthetic oligonucleotide
gaagtgaataggacacgggtcatc

SEQ ID NO: 2253 - DNA, 25 bp, Artificial Sequence
  Synthetic oligonucleotide
gaataggacacgggtcatcaactac

SEQ ID NO: 2254 - DNA, 23 bp, Artificial Sequence
  Synthetic oligonucleotide
gaataggacacgggtcatcaact

SEQ ID NO: 2255 - DNA, 25 bp, Artificial Sequence
  Synthetic oligonucleotide
ggacacgggtcatcaactacatatg

SEQ ID NO: 2256 - DNA, 23 bp, Artificial Sequence
  Synthetic oligonucleotide
gtgaataggacacgggtcatcaa

SEQ ID NO: 2257 - DNA, 22 bp, Artificial Sequence
  Synthetic oligonucleotide
gtgaataggacacgggtcatca

SEQ ID NO: 2258 - DNA, 23 bp, Artificial Sequence
  Synthetic oligonucleotide
tgaataggacacgggtcatcaac

SEQ ID NO: 2259 - DNA, 25 bp, Artificial Sequence
  Synthetic oligonucleotide
tgaataggacacgggtcatcaacta

SEQ ID NO: 2260 - DNA, 23 bp, Artificial Sequence
  Synthetic oligonucleotide
gaagtgaataggacacgggtcat

SEQ ID NO: 2261 - DNA, 24 bp, Artificial Sequence
  Synthetic oligonucleotide
gaagtgaataggacacgggtcatc

SEQ ID NO: 2262 - DNA, 25 bp, Artificial Sequence
  Synthetic oligonucleotide
gaataggacacgggtcatcaactac

SEQ ID NO: 2263 - DNA, 23 bp, Artificial Sequence
  Synthetic oligonucleotide
gaataggacacgggtcatcaact

SEQ ID NO: 2264 - DNA, 24 bp, Artificial Sequence
  Synthetic oligonucleotide
aggacacgggtcatcaactacata

SEQ ID NO: 2265 - DNA, 25 bp, Artificial Sequence
  Synthetic oligonucleotide
aggacacgggtcatcaactacatat

SEQ ID NO: 2266 - DNA, 25 bp, Artificial Sequence
  Synthetic oligonucleotide
ggacacgggtcatcaactacatatg

SEQ ID NO: 2267 - DNA, 23 bp, Artificial Sequence
  Synthetic oligonucleotide
gtgaataggacacgggtcatcaa

SEQ ID NO: 2268 - DNA, 22 bp, Artificial Sequence
  Synthetic oligonucleotide
gtgaataggacacgggtcatca

SEQ ID NO: 2269 - DNA, 23 bp, Artificial Sequence
  Synthetic oligonucleotide
tgaataggacacgggtcatcaac

SEQ ID NO: 2270 - DNA, 25 bp, Artificial Sequence
  Synthetic oligonucleotide
tgaataggacacgggtcatcaacta

SEQ ID NO: 2271 - DNA, 23 bp, Artificial Sequence
  Synthetic oligonucleotide
gaagtgaataggacacgggtcat

SEQ ID NO: 2272 - DNA, 24 bp, Artificial Sequence
  Synthetic oligonucleotide
gaagtgaataggacacgggtcatc

SEQ ID NO: 2273 - DNA, 23 bp, Artificial Sequence
  Synthetic oligonucleotide
tgaataggacacgggtcatcaac

SEQ ID NO: 2274 - DNA, 25 bp, Artificial Sequence
  Synthetic oligonucleotide
gaataggacacgggtcatcaactac

SEQ ID NO: 2275 - DNA, 23 bp, Artificial Sequence
  Synthetic oligonucleotide
gaataggacacgggtcatcaact

SEQ ID NO: 2276 - DNA, 25 bp, Artificial Sequence
  Synthetic oligonucleotide
ggacacgggtcatcaactacatatg

SEQ ID NO: 2277 - DNA, 23 bp, Artificial Sequence
  Synthetic oligonucleotide
gtgaataggacacgggtcatcaa

SEQ ID NO: 2278 - DNA, 22 bp, Artificial Sequence
  Synthetic oligonucleotide
gtgaataggacacgggtcatca

SEQ ID NO: 2279 - DNA, 23 bp, Artificial Sequence
  Synthetic oligonucleotide
tgaataggacacgggtcatcaac

SEQ ID NO: 2280 - DNA, 25 bp, Artificial Sequence
  Synthetic oligonucleotide
tgaataggacacgggtcatcaacta

SEQ ID NO: 2281 - DNA, 24 bp, Artificial Sequence
  Synthetic oligonucleotide
aggacacgggtcatcaactacata

SEQ ID NO: 2282 - DNA, 25 bp, Artificial Sequence
  Synthetic oligonucleotide
aggacacgggtcatcaactacatat

SEQ ID NO: 2283 - DNA, 23 bp, Artificial Sequence
  Synthetic oligonucleotide
gaagtgaataggacacgggtcat

SEQ ID NO: 2284 - DNA, 24 bp, Artificial Sequence
  Synthetic oligonucleotide
gaagtgaataggacacgggtcatc

SEQ ID NO: 2285 - DNA, 23 bp, Artificial Sequence
  Synthetic oligonucleotide
gaataggacacgggtcatcaact

SEQ ID NO: 2286 - DNA, 25 bp, Artificial Sequence
  Synthetic oligonucleotide
ggacacgggtcatcaactacatatg

SEQ ID NO: 2287 - DNA, 23 bp, Artificial Sequence
  Synthetic oligonucleotide
gtgaataggacacgggtcatcaa

SEQ ID NO: 2288 - DNA, 22 bp, Artificial Sequence
  Synthetic oligonucleotide
gtgaataggacacgggtcatca

SEQ ID NO: 2289 - DNA, 23 bp, Artificial Sequence
  Synthetic oligonucleotide
tgaataggacacgggtcatcaac

SEQ ID NO: 2290 - DNA, 24 bp, Artificial Sequence
  Synthetic oligonucleotide
aggacacgggtcatcaactacata

SEQ ID NO: 2291 - DNA, 25 bp, Artificial Sequence
  Synthetic oligonucleotide
aggacacgggtcatcaactacatat

SEQ ID NO: 2292 - DNA, 23 bp, Artificial Sequence
  Synthetic oligonucleotide
gaagtgaataggacacgggtcat

SEQ ID NO: 2293 - DNA, 24 bp, Artificial Sequence
  Synthetic oligonucleotide
gaagtgaataggacacgggtcatc

SEQ ID NO: 2294 - DNA, 25 bp, Artificial Sequence
  Synthetic oligonucleotide
gaataggacacgggtcatcaactac

SEQ ID NO: 2295 - DNA, 25 bp, Artificial Sequence
  Synthetic oligonucleotide
ggacacgggtcatcaactacatatg

SEQ ID NO: 2296 - DNA, 23 bp, Artificial Sequence
  Synthetic oligonucleotide
gtgaataggacacgggtcatcaa

SEQ ID NO: 2297 - DNA, 22 bp, Artificial Sequence
  Synthetic oligonucleotide
gtgaataggacacgggtcatca

SEQ ID NO: 2298 - DNA, 23 bp, Artificial Sequence
  Synthetic oligonucleotide
tgaataggacacgggtcatcaac

SEQ ID NO: 2299 - DNA, 25 bp, Artificial Sequence
  Synthetic oligonucleotide
tgaataggacacgggtcatcaacta

SEQ ID NO: 2300 - DNA, 24 bp, Artificial Sequence
  Synthetic oligonucleotide
aggacacgggtcatcaactacata

SEQ ID NO: 2301 - DNA, 25 bp, Artificial Sequence
  Synthetic oligonucleotide
aggacacgggtcatcaactacatat

SEQ ID NO: 2302 - DNA, 23 bp, Artificial Sequence
  Synthetic oligonucleotide
agaagtgaataggacacgggtca

SEQ ID NO: 2303 - DNA, 23 bp, Artificial Sequence
  Synthetic oligonucleotide
gaagtgaataggacacgggtcat

SEQ ID NO: 2304 - DNA, 24 bp, Artificial Sequence
  Synthetic oligonucleotide
gaagtgaataggacacgggtcatc

SEQ ID NO: 2305 - DNA, 25 bp, Artificial Sequence
  Synthetic oligonucleotide
gaataggacacgggtcatcaactac

SEQ ID NO: 2306 - DNA, 23 bp, Artificial Sequence
  Synthetic oligonucleotide
gaataggacacgggtcatcaact

SEQ ID NO: 2307 - DNA, 24 bp, Artificial Sequence
  Synthetic oligonucleotide
aggacacgggtcatcaactacata

SEQ ID NO: 2308 - DNA, 25 bp, Artificial Sequence
  Synthetic oligonucleotide
aggacacgggtcatcaactacatat

SEQ ID NO: 2309 - DNA, 25 bp, Artificial Sequence
  Synthetic oligonucleotide
ggacacgggtcatcaactacatatg

SEQ ID NO: 2310 - DNA, 23 bp, Artificial Sequence
  Synthetic oligonucleotide
gtgaataggacacgggtcatcaa

SEQ ID NO: 2311 - DNA, 22 bp, Artificial Sequence
  Synthetic oligonucleotide
gtgaataggacacgggtcatca

SEQ ID NO: 2312 - DNA, 23 bp, Artificial Sequence
  Synthetic oligonucleotide
tgaataggacacgggtcatcaac

SEQ ID NO: 2313 - DNA, 25 bp, Artificial Sequence
  Synthetic oligonucleotide
tgaataggacacgggtcatcaacta

SEQ ID NO: 2314 - DNA, 23 bp, Artificial Sequence
  Synthetic oligonucleotide
gaagtgaataggacacgggtcat

SEQ ID NO: 2315 - DNA, 24 bp, Artificial Sequence
  Synthetic oligonucleotide
gaagtgaataggacacgggtcatc

SEQ ID NO: 2316 - DNA, 25 bp, Artificial Sequence
  Synthetic oligonucleotide
gaataggacacgggtcatcaactac

SEQ ID NO: 2317 - DNA, 23 bp, Artificial Sequence
  Synthetic oligonucleotide
gaataggacacgggtcatcaact

SEQ ID NO: 2318 - DNA, 21 bp, Artificial Sequence
  Synthetic oligonucleotide
ggacacgggtcatcaactaca

SEQ ID NO: 2319 - DNA, 25 bp, Artificial Sequence
  Synthetic oligonucleotide
ggacacgggtcatcaactacatatg

SEQ ID NO: 2320 - DNA, 23 bp, Artificial Sequence
  Synthetic oligonucleotide
gtgaataggacacgggtcatcaa

SEQ ID NO: 2321 - DNA, 22 bp, Artificial Sequence
  Synthetic oligonucleotide
gtgaataggacacgggtcatca

SEQ ID NO: 2322 - DNA, 23 bp, Artificial Sequence
  Synthetic oligonucleotide
tgaataggacacgggtcatcaac

SEQ ID NO: 2323 - DNA, 25 bp, Artificial Sequence
  Synthetic oligonucleotide
tgaataggacacgggtcatcaacta

SEQ ID NO: 2324 - DNA, 24 bp, Artificial Sequence
  Synthetic oligonucleotide
cacgggtcatcaactacatatggt

SEQ ID NO: 2325 - DNA, 24 bp, Artificial Sequence
  Synthetic oligonucleotide
cacgggtcatcaactacatatggt

SEQ ID NO: 2326 - DNA, 24 bp, Artificial Sequence
  Synthetic oligonucleotide
cacgggtcatcaactacatatggt

SEQ ID NO: 2327 - DNA, 27 bp, Artificial Sequence
  Synthetic oligonucleotide
ggaacatgtctggacctatagttttca

SEQ ID NO: 2328 - DNA, 31 bp, Artificial Sequence
  Synthetic oligonucleotide
ggaaagtaacaattaaaaccttcaacaccat

SEQ ID NO: 2329 - DNA, 26 bp, Artificial Sequence
  Synthetic oligonucleotide
tgatggattgactagctacactacgt

SEQ ID NO: 2330 - DNA, 26 bp, Artificial Sequence
  Synthetic oligonucleotide
tgatggattgactagctacactacgt

SEQ ID NO: 2331 - DNA, 31 bp, Artificial Sequence
  Synthetic oligonucleotide
aaacctagtgatgttaatacctattggcaaa

SEQ ID NO: 2332 - DNA, 31 bp, Artificial Sequence; identical to SEQ ID NO: 2331
  Synthetic oligonucleotide

SEQ ID NO: 2333 - DNA, 31 bp, Artificial Sequence
  Synthetic oligonucleotide
gcaagtaaagtttgaaacctagtgatgttaa

SEQ ID NO: 2334 - DNA, 31 bp, Artificial Sequence; identical to SEQ ID NO: 2331
  Synthetic oligonucleotide

SEQ ID NO: 2335 - DNA, 31 bp, Artificial Sequence; identical to SEQ ID NO: 2333
  Synthetic oligonucleotide

SEQ ID NO: 2336 - DNA, 26 bp, Artificial Sequence
  Synthetic oligonucleotide
aagaatctcaagtgtctgtggatcac

SEQ ID NO: 2337 - DNA, 18 bp, Artificial Sequence
  Synthetic oligonucleotide
gtggatcacggacagcat

SEQ ID NO: 2338 - DNA, 18 bp, Artificial Sequence
  Synthetic oligonucleotide
gtggatcacggacagcat

SEQ ID NO: 2339 - DNA, 18 bp, Artificial Sequence
  Synthetic oligonucleotide
gtggatcacggacagcat

SEQ ID NO: 2340 - DNA, 26 bp, Artificial Sequence
  Synthetic oligonucleotide
aagaatctcaagtgtctgtggatcac

SEQ ID NO: 2341 - DNA, 26 bp, Artificial Sequence
  Synthetic oligonucleotide
caagaatctcaagtgtctgtggatca

SEQ ID NO: 2342 - DNA, 26 bp, Artificial Sequence
  Synthetic oligonucleotide
gtcaagaatctcaagtgtctgtggat

SEQ ID NO: 2343 - DNA, 20 bp, Artificial Sequence
  Synthetic oligonucleotide
gtggatcacggacagcatca

SEQ ID NO: 2344 - DNA, 26 bp, Artificial Sequence
  Synthetic oligonucleotide
aagaatctcaagtgtctgtggatcac

SEQ ID NO: 2345 - DNA, 26 bp, Artificial Sequence
  Synthetic oligonucleotide
caagaatctcaagtgtctgtggatca

SEQ ID NO: 2346 - DNA, 20 bp, Artificial Sequence
  Synthetic oligonucleotide
tggatcacggacagcatcag

SEQ ID NO: 2347 - DNA, 26 bp, Artificial Sequence
  Synthetic oligonucleotide
gtcaagaatctcaagtgtctgtggat

SEQ ID NO: 2348 - DNA, 20 bp, Artificial Sequence
  Synthetic oligonucleotide
gtggatcacggacagcatca

SEQ ID NO: 2349 - DNA, 20 bp, Artificial Sequence
  Synthetic oligonucleotide
tggatcacggacagcatcag

SEQ ID NO: 2350 - DNA, 20 bp, Artificial Sequence
  Synthetic oligonucleotide
gtggatcacggacagcatca

SEQ ID NO: 2351 - DNA, 20 bp, Artificial Sequence
  Synthetic oligonucleotide
tggatcacggacagcatcag

SEQ ID NO: 2352 - DNA, 26 bp, Artificial Sequence
  Synthetic oligonucleotide
aagaatctcaagtgtctgtggatcac

SEQ ID NO: 2353 - DNA, 24 bp, Artificial Sequence
  Synthetic oligonucleotide
aatctcaagtgtctgtggatcacg

SEQ ID NO: 2354 - DNA, 26 bp, Artificial Sequence
  Synthetic oligonucleotide
caagaatctcaagtgtctgtggatca

SEQ ID NO: 2355 - DNA, 21 bp, Artificial Sequence
  Synthetic oligonucleotide
caagtgtctgtggatcacgga

SEQ ID NO: 2356 - DNA, 20 bp, Artificial Sequence
  Synthetic oligonucleotide
ctgtggatcacggacagcat

SEQ ID NO: 2357 - DNA, 25 bp, Artificial Sequence
  Synthetic oligonucleotide
gtcaagaatctcaagtgtctgtgga

SEQ ID NO: 2358 - DNA, 26 bp, Artificial Sequence
  Synthetic oligonucleotide
gtcaagaatctcaagtgtctgtggat

SEQ ID NO: 2359 - DNA, 20 bp, Artificial Sequence
  Synthetic oligonucleotide
gtggatcacggacagcatca

SEQ ID NO: 2360 - DNA, 29 bp, Artificial Sequence
  Synthetic oligonucleotide
gtgtaatgtcaagaatctcaagtgtctgt

SEQ ID NO: 2361 - DNA, 20 bp, Artificial Sequence
  Synthetic oligonucleotide
tggatcacggacagcatcag

SEQ ID NO: 2362 - DNA, 25 bp, Artificial Sequence
  Synthetic oligonucleotide
tgtcaagaatctcaagtgtctgtgg

SEQ ID NO: 2363 - DNA, 20 bp, Artificial Sequence
  Synthetic oligonucleotide
tgtggatcacggacagcatc

SEQ ID NO: 2364 - DNA, 20 bp, Artificial Sequence
  Synthetic oligonucleotide
gtggatcacggacagcatca

SEQ ID NO: 2365 - DNA, 20 bp, Artificial Sequence
  Synthetic oligonucleotide
tggatcacggacagcatcag

SEQ ID NO: 2366 - DNA, 20 bp, Artificial Sequence
  Synthetic oligonucleotide
gtggatcacggacagcatca

SEQ ID NO: 2367 - DNA, 20 bp, Artificial Sequence
  Synthetic oligonucleotide
tggatcacggacagcatcag

SEQ ID NO: 2368 - DNA, 20 bp, Artificial Sequence
  Synthetic oligonucleotide
gtggatcacggacagcatca

SEQ ID NO: 2369 - DNA, 20 bp, Artificial Sequence
  Synthetic oligonucleotide
tggatcacggacagcatcag

SEQ ID NO: 2370 - DNA, 20 bp, Artificial Sequence
  Synthetic oligonucleotide
gtggatcacggacagcatca

SEQ ID NO: 2371 - DNA, 20 bp, Artificial Sequence
  Synthetic oligonucleotide
tggatcacggacagcatcag

SEQ ID NO: 2372 - DNA, 26 bp, Artificial Sequence
  Synthetic oligonucleotide
aagaatctcaagtgtctgtggatcac

SEQ ID NO: 2373 - DNA, 20 bp, Artificial Sequence
  Synthetic oligonucleotide
gtggatcacggacagcatca

SEQ ID NO: 2374 - DNA, 20 bp, Artificial Sequence
  Synthetic oligonucleotide
tggatcacggacagcatcag

SEQ ID NO: 2375 - DNA, 26 bp, Artificial Sequence
  Synthetic oligonucleotide
caagaatctcaagtgtctgtggatca

SEQ ID NO: 2376 - DNA, 26 bp, Artificial Sequence
  Synthetic oligonucleotide
gtcaagaatctcaagtgtctgtggat

SEQ ID NO: 2377 - DNA, 20 bp, Artificial Sequence
  Synthetic oligonucleotide
gtggatcacggacagcatca

SEQ ID NO: 2378 - DNA, 20 bp, Artificial Sequence
  Synthetic oligonucleotide
tggatcacggacagcatcag

SEQ ID NO: 2379 - DNA, 20 bp, Artificial Sequence
  Synthetic oligonucleotide
gtggatcacggacagcatca

SEQ ID NO: 2380 - DNA, 20 bp, Artificial Sequence
  Synthetic oligonucleotide
tggatcacggacagcatcag

SEQ ID NO: 2381 - DNA, 30 bp, Artificial Sequence
  Synthetic oligonucleotide
ggcaatagagttattagagtaagcaactga

SEQ ID NO: 2382 - DNA, 29 bp, Artificial Sequence
  Synthetic oligonucleotide
agtaaaatttgtgggtatggcaatagagt

SEQ ID NO: 2383 - DNA, 24 bp, Artificial Sequence
  Synthetic oligonucleotide
ttgtgggtatggcaatagagttat

SEQ ID NO: 2384 - DNA, 24 bp, Artificial Sequence
  Synthetic oligonucleotide
ttgtgggtatggcaatagagttat

SEQ ID NO: 2385 - DNA, 24 bp, Artificial Sequence
  Synthetic oligonucleotide
ttgtgggtatggcaatagagttat

SEQ ID NO: 2386 - DNA, 24 bp, Artificial Sequence
  Synthetic oligonucleotide
ttgtgggtatggcaatagagttat

SEQ ID NO: 2387 - DNA, 29 bp, Artificial Sequence
  Synthetic oligonucleotide
tgtgggtatggcaatagagttattagagt

SEQ ID NO: 2388 - DNA, 30 bp, Artificial Sequence
  Synthetic oligonucleotide
agtaaaatttgtgggtatggcaatagagtt

SEQ ID NO: 2389 - DNA, 30 bp, Artificial Sequence; identical to SEQ ID NO: 2388
  Synthetic oligonucleotide

SEQ ID NO: 2390 - DNA, 29 bp, Artificial Sequence
  Synthetic oligonucleotide
tgtgggtatggcaatagagttattagagt

SEQ ID NO: 2391 - DNA, 29 bp, Artificial Sequence
  Synthetic oligonucleotide
tgtgggtatggcaatagagttattagagt

SEQ ID NO: 2392 - DNA, 30 bp, Artificial Sequence; identical to SEQ ID NO: 2388
  Synthetic oligonucleotide

SEQ ID NO: 2393 - DNA, 29 bp, Artificial Sequence
  Synthetic oligonucleotide
tgtgggtatggcaatagagttattagagt

SEQ ID NO: 2394 - DNA, 25 bp, Artificial Sequence
  Synthetic oligonucleotide
gtaggacagggttatcaaacctctt

SEQ ID NO: 2395 - DNA, 27 bp, Artificial Sequence
  Synthetic oligonucleotide
ccatcattaaatggtaggacagggtta

SEQ ID NO: 2396 - DNA, 23 bp, Artificial Sequence
  Synthetic oligonucleotide
cagctgtccaacctgaagaagaa

SEQ ID NO: 2397 - DNA, 26 bp, Artificial Sequence
  Synthetic oligonucleotide
acaacatcacagttaccagacacaaa

SEQ ID NO: 2398 - DNA, 23 bp, Artificial Sequence
  Synthetic oligonucleotide
atcacagttaccagacacaaatg

SEQ ID NO: 2399 - DNA, 23 bp, Artificial Sequence
  Synthetic oligonucleotide
atcacagttaccagacacaaatg

SEQ ID NO: 2400 - DNA, 23 bp, Artificial Sequence
  Synthetic oligonucleotide
atcacagttaccagacacaaatg

SEQ ID NO: 2401 - DNA, 23 bp, Artificial Sequence
  Synthetic oligonucleotide
atcacagttaccagacacaaatg

SEQ ID NO: 2402 - DNA, 26 bp, Artificial Sequence
  Synthetic oligonucleotide
tctaccaatggttctaaagccgaaaa

SEQ ID NO: 2403 - DNA, 23 bp, Artificial Sequence
  Synthetic oligonucleotide
accaatggttctaaagccgaaaa

SEQ ID NO: 2404 - DNA, 23 bp, Artificial Sequence
  Synthetic oligonucleotide
accaatggttctaaagccgaaaa

SEQ ID NO: 2405 - DNA, 23 bp, Artificial Sequence
  Synthetic oligonucleotide
accaatggttctaaagccgaaaa

SEQ ID NO: 2406 - DNA, 23 bp, Artificial Sequence
  Synthetic oligonucleotide
accaatggttctaaagccgaaaa

SEQ ID NO: 2407 - DNA, 18 bp, Artificial Sequence
  Synthetic oligonucleotide
gcagcaccagctgtccaa

SEQ ID NO: 2408 - DNA, 18 bp, Artificial Sequence
  Synthetic oligonucleotide
gcagcaccagctgtccaa

SEQ ID NO: 2409 - DNA, 18 bp, Artificial Sequence
  Synthetic oligonucleotide
gcagcaccagctgtccaa

SEQ ID NO: 2410 - DNA, 24 bp, Artificial Sequence
  Synthetic oligonucleotide
gcatgaatagcaacagggacttct

SEQ ID NO: 2411 - DNA, 23 bp, Artificial Sequence
  Synthetic oligonucleotide
catgaatagcaacagggacttct

SEQ ID NO: 2412 - DNA, 32 bp, Artificial Sequence
  Synthetic oligonucleotide
ttcagttgaaatatctctctcaaaaggtttga

SEQ ID NO: 2413 - DNA, 22 bp, Artificial Sequence
  Synthetic oligonucleotide
tgaggcggtcaatttctttttg

SEQ ID NO: 2414 - DNA, 23 bp, Artificial Sequence
  Synthetic oligonucleotide
gcatgaatagcaacagggacttc

SEQ ID NO: 2415 - DNA, 24 bp, Artificial Sequence
  Synthetic oligonucleotide
gcatgaatagcaacagggacttct

SEQ ID NO: 2416 - DNA, 23 bp, Artificial Sequence
  Synthetic oligonucleotide
gcatgaatagcaacagggacttc

SEQ ID NO: 2417 - DNA, 24 bp, Artificial Sequence
  Synthetic oligonucleotide
gcatgaatagcaacagggacttct

SEQ ID NO: 2418 - DNA, 23 bp, Artificial Sequence
  Synthetic oligonucleotide
tgcatgaatagcaacagggactt

SEQ ID NO: 2419 - DNA, 27 bp, Artificial Sequence
  Synthetic oligonucleotide
aggagtaagttgatctgcatgaatagc

SEQ ID NO: 2420 - DNA, 24 bp, Artificial Sequence
  Synthetic oligonucleotide
catgaatagcaacagggacttctg

SEQ ID NO: 2421 - DNA, 25 bp, Artificial Sequence
  Synthetic oligonucleotide
catgaatagcaacagggacttctgt

SEQ ID NO: 2422 - DNA, 23 bp, Artificial Sequence
  Synthetic oligonucleotide
gcatgaatagcaacagggacttc

SEQ ID NO: 2423 - DNA, 24 bp, Artificial Sequence
  Synthetic oligonucleotide
gcatgaatagcaacagggacttct

SEQ ID NO: 2424 - DNA, 28 bp, Artificial Sequence
  Synthetic oligonucleotide
ggagtaagttgatctgcatgaatagcaa

SEQ ID NO: 2425 - DNA, 27 bp, Artificial Sequence
  Synthetic oligonucleotide
ggagtaagttgatctgcatgaatagca

SEQ ID NO: 2426 - DNA, 23 bp, Artificial Sequence
  Synthetic oligonucleotide
tgcatgaatagcaacagggactt

SEQ ID NO: 2427 - DNA, 24 bp, Artificial Sequence
  Synthetic oligonucleotide
catgaatagcaacagggacttctg

SEQ ID NO: 2428 - DNA, 23 bp, Artificial Sequence
  Synthetic oligonucleotide
gcatgaatagcaacagggacttc

SEQ ID NO: 2429 - DNA, 24 bp, Artificial Sequence
  Synthetic oligonucleotide
gcatgaatagcaacagggacttct

SEQ ID NO: 2430 - DNA, 24 bp, Artificial Sequence
  Synthetic oligonucleotide
catgaatagcaacagggacttctg

SEQ ID NO: 2431 - DNA, 23 bp, Artificial Sequence
  Synthetic oligonucleotide
gcatgaatagcaacagggacttc

SEQ ID NO: 2432 - DNA, 24 bp, Artificial Sequence
  Synthetic oligonucleotide
gcatgaatagcaacagggacttct

SEQ ID NO: 2433 - DNA, 24 bp, Artificial Sequence
  Synthetic oligonucleotide
catgaatagcaacagggacttctg

SEQ ID NO: 2434 - DNA, 25 bp, Artificial Sequence
  Synthetic oligonucleotide
catgaatagcaacagggacttctgt

SEQ ID NO: 2435 - DNA, 24 bp, Artificial Sequence
  Synthetic oligonucleotide
gatctgcatgaatagcaacaggga

SEQ ID NO: 2436 - DNA, 23 bp, Artificial Sequence
  Synthetic oligonucleotide
tgcatgaatagcaacagggactt

SEQ ID NO: 2437 - DNA, 23 bp, Artificial Sequence
  Synthetic oligonucleotide
gcatgaatagcaacagggacttc

SEQ ID NO: 2438 - DNA, 24 bp, Artificial Sequence
  Synthetic oligonucleotide
gcatgaatagcaacagggacttct

SEQ ID NO: 2439 - DNA, 22 bp, Artificial Sequence
  Synthetic oligonucleotide
tgcatgaatagcaacagggact

SEQ ID NO: 2440 - DNA, 23 bp, Artificial Sequence
  Synthetic oligonucleotide
tgcatgaatagcaacagggactt

SEQ ID NO: 2441 - DNA, 29 bp, Artificial Sequence
  Synthetic oligonucleotide
tgcttggttttgatggatctggtaatatt

SEQ ID NO: 2442 - DNA, 29 bp, Artificial Sequence
  Synthetic oligonucleotide
tgcttggttttgatggatctggtaatatt

SEQ ID NO: 2443 - DNA, 29 bp, Artificial Sequence
  Synthetic oligonucleotide
tgcttggttttgatggatctggtaatatt

SEQ ID NO: 2444 - DNA, 26 bp, Artificial Sequence
  Synthetic oligonucleotide
cagtggaagcaaaataaacaccatca

SEQ ID NO: 2445 - DNA, 25 bp, Artificial Sequence
  Synthetic oligonucleotide
gtggaagcaaaataaacaccatcat

SEQ ID NO: 2446 - DNA, 26 bp, Artificial Sequence
  Synthetic oligonucleotide
cagtggaagcaaaataaacaccatca

SEQ ID NO: 2447 - DNA, 25 bp, Artificial Sequence
  Synthetic oligonucleotide
tggaagcaaaataaacaccatcatt

SEQ ID NO: 2448 - DNA, 26 bp, Artificial Sequence
  Synthetic oligonucleotide
cagtggaagcaaaataaacaccatca

SEQ ID NO: 2449 - DNA, 31 bp, Artificial Sequence
  Synthetic oligonucleotide
agtggaagcaaaataaacaccatcattaaat

SEQ ID NO: 2450 - DNA, 26 bp, Artificial Sequence
  Synthetic oligonucleotide
cagtggaagcaaaataaacaccatca

SEQ ID NO: 2451 - DNA, 27 bp, Artificial Sequence
  Synthetic oligonucleotide
cagtggaagcaaaataaacaccatcat

SEQ ID NO: 2452 - DNA, 31 bp, Artificial Sequence
  Synthetic oligonucleotide
cagtggaagcaaaataaacaccatcattaaa

SEQ ID NO: 2453 - DNA, 30 bp, Artificial Sequence
  Synthetic oligonucleotide
cagtggaagcaaaataaacaccatcattaa

SEQ ID NO: 2454 - DNA, 29 bp, Artificial Sequence
  Synthetic oligonucleotide
cagtggaagcaaaataaacaccatcatta

SEQ ID NO: 2455 - DNA, 28 bp, Artificial Sequence
  Synthetic oligonucleotide
cagtggaagcaaaataaacaccatcatt

SEQ ID NO: 2456 - DNA, 27 bp, Artificial Sequence
  Synthetic oligonucleotide
ctcagtggaagcaaaataaacaccatc

SEQ ID NO: 2457 - DNA, 28 bp, Artificial Sequence
  Synthetic oligonucleotide
gacttctcagtggaagcaaaataaacac

SEQ ID NO: 2458 - DNA, 26 bp, Artificial Sequence
  Synthetic oligonucleotide
tctcagtggaagcaaaataaacacca

SEQ ID NO: 2459 - DNA, 27 bp, Artificial Sequence
  Synthetic oligonucleotide
tctcagtggaagcaaaataaacaccat

SEQ ID NO: 2460 - DNA, 26 bp, Artificial Sequence
  Synthetic oligonucleotide
cagtggaagcaaaataaacaccatca

SEQ ID NO: 2461 - DNA, 27 bp, Artificial Sequence
  Synthetic oligonucleotide
cagtggaagcaaaataaacaccatcat

SEQ ID NO: 2462 - DNA, 27 bp, Artificial Sequence
  Synthetic oligonucleotide
tctcagtggaagcaaaataaacaccat

SEQ ID NO: 2463 - DNA, 31 bp, Artificial Sequence; identical to SEQ ID NO: 2449
  Synthetic oligonucleotide

SEQ ID NO: 2464 - DNA, 26 bp, Artificial Sequence
  Synthetic oligonucleotide
cagtggaagcaaaataaacaccatca

SEQ ID NO: 2465 - DNA, 27 bp, Artificial Sequence
  Synthetic oligonucleotide
cagtggaagcaaaataaacaccatcat

SEQ ID NO: 2466 - DNA, 31 bp, Artificial Sequence; identical to SEQ ID NO: 2452
  Synthetic oligonucleotide

SEQ ID NO: 2467 - DNA, 30 bp, Artificial Sequence; identical to SEQ ID NO: 2453
  Synthetic oligonucleotide

SEQ ID NO: 2468 - DNA, 29 bp, Artificial Sequence
  Synthetic oligonucleotide
cagtggaagcaaaataaacaccatcatta

SEQ ID NO: 2469 - DNA, 28 bp, Artificial Sequence
  Synthetic oligonucleotide
cagtggaagcaaaataaacaccatcatt

SEQ ID NO: 2470 - DNA, 27 bp, Artificial Sequence
  Synthetic oligonucleotide
ctcagtggaagcaaaataaacaccatc

SEQ ID NO: 2471 - DNA, 28 bp, Artificial Sequence
  Synthetic oligonucleotide
gacttctcagtggaagcaaaataaacac

SEQ ID NO: 2472 - DNA, 31 bp, Artificial Sequence; identical to SEQ ID NO: 2449
  Synthetic oligonucleotide

SEQ ID NO: 2473 - DNA, 26 bp, Artificial Sequence
  Synthetic oligonucleotide
cagtggaagcaaaataaacaccatca

SEQ ID NO: 2474 - DNA, 27 bp, Artificial Sequence
  Synthetic oligonucleotide
cagtggaagcaaaataaacaccatcat

SEQ ID NO: 2475 - DNA, 31 bp, Artificial Sequence; identical to SEQ ID NO: 2452
  Synthetic oligonucleotide

SEQ ID NO: 2476 - DNA, 30 bp, Artificial Sequence; identical to SEQ ID NO: 2453
  Synthetic oligonucleotide

SEQ ID NO: 2477 - DNA, 29 bp, Artificial Sequence
  Synthetic oligonucleotide
cagtggaagcaaaataaacaccatcatta

SEQ ID NO: 2478 - DNA, 28 bp, Artificial Sequence
  Synthetic oligonucleotide
cagtggaagcaaaataaacaccatcatt

SEQ ID NO: 2479 - DNA, 27 bp, Artificial Sequence
  Synthetic oligonucleotide
ctcagtggaagcaaaataaacaccatc

SEQ ID NO: 2480 - DNA, 28 bp, Artificial Sequence
  Synthetic oligonucleotide
gacttctcagtggaagcaaaataaacac

SEQ ID NO: 2481 - DNA, 26 bp, Artificial Sequence
  Synthetic oligonucleotide
cagtggaagcaaaataaacaccatca

SEQ ID NO: 2482 - DNA, 27 bp, Artificial Sequence
  Synthetic oligonucleotide
cagtggaagcaaaataaacaccatcat

SEQ ID NO: 2483 - DNA, 29 bp, Artificial Sequence
  Synthetic oligonucleotide
cagtggaagcaaaataaacaccatcatta

SEQ ID NO: 2484 - DNA, 28 bp, Artificial Sequence
  Synthetic oligonucleotide
cagtggaagcaaaataaacaccatcatt

SEQ ID NO: 2485 - DNA, 27 bp, Artificial Sequence
  Synthetic oligonucleotide
tctcagtggaagcaaaataaacaccat

SEQ ID NO: 2486 - DNA, 31 bp, Artificial Sequence; identical to SEQ ID NO: 2449
  Synthetic oligonucleotide

SEQ ID NO: 2487 - DNA, 26 bp, Artificial Sequence
  Synthetic oligonucleotide
cagtggaagcaaaataaacaccatca

SEQ ID NO: 2488 - DNA, 27 bp, Artificial Sequence
  Synthetic oligonucleotide
cagtggaagcaaaataaacaccatcat

SEQ ID NO: 2489 - DNA, 31 bp, Artificial Sequence; identical to SEQ ID NO: 2452
  Synthetic oligonucleotide

SEQ ID NO: 2490 - DNA, 30 bp, Artificial Sequence; identical to SEQ ID NO: 2453
  Synthetic oligonucleotide

SEQ ID NO: 2491 - DNA, 29 bp, Artificial Sequence
  Synthetic oligonucleotide
cagtggaagcaaaataaacaccatcatta

SEQ ID NO: 2492 - DNA, 27 bp, Artificial Sequence
  Synthetic oligonucleotide
ctcagtggaagcaaaataaacaccatc

SEQ ID NO: 2493 - DNA, 28 bp, Artificial Sequence
  Synthetic oligonucleotide
gacttctcagtggaagcaaaataaacac

SEQ ID NO: 2494 - DNA, 26 bp, Artificial Sequence
  Synthetic oligonucleotide
tctcagtggaagcaaaataaacacca

SEQ ID NO: 2495 - DNA, 27 bp, Artificial Sequence
  Synthetic oligonucleotide
tctcagtggaagcaaaataaacaccat

SEQ ID NO: 2496 - DNA, 26 bp, Artificial Sequence
  Synthetic oligonucleotide
cagtggaagcaaaataaacaccatca

SEQ ID NO: 2497 - DNA, 27 bp, Artificial Sequence
  Synthetic oligonucleotide
cagtggaagcaaaataaacaccatcat

SEQ ID NO: 2498 - DNA, 27 bp, Artificial Sequence
  Synthetic oligonucleotide
tctcagtggaagcaaaataaacaccat

SEQ ID NO: 2499 - DNA, 31 bp, Artificial Sequence; identical to SEQ ID NO: 2449
  Synthetic oligonucleotide

SEQ ID NO: 2500 - DNA, 26 bp, Artificial Sequence
  Synthetic oligonucleotide
cagtggaagcaaaataaacaccatca

SEQ ID NO: 2501 - DNA, 27 bp, Artificial Sequence
  Synthetic oligonucleotide
cagtggaagcaaaataaacaccatcat

SEQ ID NO: 2502 - DNA, 31 bp, Artificial Sequence; identical to SEQ ID NO: 2452
  Synthetic oligonucleotide

SEQ ID NO: 2503 - DNA, 30 bp, Artificial Sequence; identical to SEQ ID NO: 2453
  Synthetic oligonucleotide

SEQ ID NO: 2504 - DNA, 29 bp, Artificial Sequence
  Synthetic oligonucleotide
cagtggaagcaaaataaacaccatcatta

SEQ ID NO: 2505 - DNA, 28 bp, Artificial Sequence
  Synthetic oligonucleotide
cagtggaagcaaaataaacaccatcatt

SEQ ID NO: 2506 - DNA, 27 bp, Artificial Sequence
  Synthetic oligonucleotide
ctcagtggaagcaaaataaacaccatc

SEQ ID NO: 2507 - DNA, 28 bp, Artificial Sequence
  Synthetic oligonucleotide
gacttctcagtggaagcaaaataaacac

SEQ ID NO: 2508 - DNA, 31 bp, Artificial Sequence; identical to SEQ ID NO: 2449
  Synthetic oligonucleotide

SEQ ID NO: 2509 - DNA, 26 bp, Artificial Sequence
  Synthetic oligonucleotide
cagtggaagcaaaataaacaccatca

SEQ ID NO: 2510 - DNA, 27 bp, Artificial Sequence
  Synthetic oligonucleotide
cagtggaagcaaaataaacaccatcat

SEQ ID NO: 2511 - DNA, 31 bp, Artificial Sequence; identical to SEQ ID NO: 2452
  Synthetic oligonucleotide

SEQ ID NO: 2512 - DNA, 30 bp, Artificial Sequence; identical to SEQ ID NO: 2453
  Synthetic oligonucleotide

SEQ ID NO: 2513 - DNA, 29 bp, Artificial Sequence
  Synthetic oligonucleotide
cagtggaagcaaaataaacaccatcatta

SEQ ID NO: 2514 - DNA, 28 bp, Artificial Sequence
  Synthetic oligonucleotide
cagtggaagcaaaataaacaccatcatt

SEQ ID NO: 2515 - DNA, 26 bp, Artificial Sequence
  Synthetic oligonucleotide
tctcagtggaagcaaaataaacacca

SEQ ID NO: 2516 - DNA, 27 bp, Artificial Sequence
  Synthetic oligonucleotide
tctcagtggaagcaaaataaacaccat

SEQ ID NO: 2517 - DNA, 27 bp, Artificial Sequence
  Synthetic oligonucleotide
ctcagtggaagcaaaataaacaccatc

SEQ ID NO: 2518 - DNA, 28 bp, Artificial Sequence
  Synthetic oligonucleotide
gacttctcagtggaagcaaaataaacac

SEQ ID NO: 2519 - DNA, 26 bp, Artificial Sequence
  Synthetic oligonucleotide
tctcagtggaagcaaaataaacacca

SEQ ID NO: 2520 - DNA, 27 bp, Artificial Sequence
  Synthetic oligonucleotide
tctcagtggaagcaaaataaacaccat

SEQ ID NO: 2521 - DNA, 26 bp, Artificial Sequence
  Synthetic oligonucleotide
cagtggaagcaaaataaacaccatca

SEQ ID NO: 2522 - DNA, 27 bp, Artificial Sequence
  Synthetic oligonucleotide
cagtggaagcaaaataaacaccatcat

SEQ ID NO: 2523 - DNA, 27 bp, Artificial Sequence
  Synthetic oligonucleotide
tctcagtggaagcaaaataaacaccat

SEQ ID NO: 2524 - DNA, 31 bp, Artificial Sequence; identical to SEQ ID NO: 2449
  Synthetic oligonucleotide

SEQ ID NO: 2525 - DNA, 26 bp, Artificial Sequence
  Synthetic oligonucleotide
cagtggaagcaaaataaacaccatca

SEQ ID NO: 2526 - DNA, 27 bp, Artificial Sequence
  Synthetic oligonucleotide
cagtggaagcaaaataaacaccatcat

SEQ ID NO: 2527 - DNA, 31 bp, Artificial Sequence; identical to SEQ ID NO: 2452
  Synthetic oligonucleotide

SEQ ID NO: 2528 - DNA, 30 bp, Artificial Sequence; identical to SEQ ID NO: 2453
  Synthetic oligonucleotide

SEQ ID NO: 2529 - DNA, 29 bp, Artificial Sequence
  Synthetic oligonucleotide
cagtggaagcaaaataaacaccatcatta

SEQ ID NO: 2530 - DNA, 28 bp, Artificial Sequence
  Synthetic oligonucleotide
cagtggaagcaaaataaacaccatcatt

SEQ ID NO: 2531 - DNA, 27 bp, Artificial Sequence
  Synthetic oligonucleotide
ctcagtggaagcaaaataaacaccatc

SEQ ID NO: 2532 - DNA, 28 bp, Artificial Sequence
  Synthetic oligonucleotide
gacttctcagtggaagcaaaataaacac

SEQ ID NO: 2533 - DNA, 26 bp, Artificial Sequence
  Synthetic oligonucleotide
tctcagtggaagcaaaataaacacca

SEQ ID NO: 2534 - DNA, 27 bp, Artificial Sequence
  Synthetic oligonucleotide
tctcagtggaagcaaaataaacaccat

SEQ ID NO: 2535 - DNA, 26 bp, Artificial Sequence
  Synthetic oligonucleotide
cagtggaagcaaaataaacaccatca

SEQ ID NO: 2536 - DNA, 27 bp, Artificial Sequence
  Synthetic oligonucleotide
cagtggaagcaaaataaacaccatcat

SEQ ID NO: 2537 - DNA, 27 bp, Artificial Sequence
  Synthetic oligonucleotide
tctcagtggaagcaaaataaacaccat

SEQ ID NO: 2538 - DNA, 29 bp, Artificial Sequence
  Synthetic oligonucleotide
agtactactactctgtatggttggtaacc

SEQ ID NO: 2539 - DNA, 30 bp, Artificial Sequence
  Synthetic oligonucleotide
tggaagcaaaataaacaccatcattaaatg

SEQ ID NO: 2540 - DNA, 30 bp, Artificial Sequence; identical to SEQ ID NO: 2539
  Synthetic oligonucleotide

SEQ ID NO: 2541 - DNA, 25 bp, Artificial Sequence
  Synthetic oligonucleotide
gtgtttaaagcttgtgcattttggt

SEQ ID NO: 2542 - DNA, 25 bp, Artificial Sequence
  Synthetic oligonucleotide
gtgtttaaagcttgtgcattttggt

SEQ ID NO: 2543 - DNA, 24 bp, Artificial Sequence
  Synthetic oligonucleotide
ctgaagaagaatcaccaggagtca

SEQ ID NO: 2544 - DNA, 25 bp, Artificial Sequence
  Synthetic oligonucleotide
gaagaagaatcaccaggagtcaaat

SEQ ID NO: 2545 - DNA, 26 bp, Artificial Sequence
  Synthetic oligonucleotide
ctgaagaagaatcaccaggagtcaaa

SEQ ID NO: 2546 - DNA, 25 bp, Artificial Sequence
  Synthetic oligonucleotide
ctgaagaagaatcaccaggagtcaa

SEQ ID NO: 2547 - DNA, 26 bp, Artificial Sequence
  Synthetic oligonucleotide
ctgaagaagaatcaccaggagtcaaa

SEQ ID NO: 2548 - DNA, 24 bp, Artificial Sequence
  Synthetic oligonucleotide
ctgaagaagaatcaccaggagtca

SEQ ID NO: 2549 - DNA, 25 bp, Artificial Sequence
  Synthetic oligonucleotide
ctgaagaagaatcaccaggagtcaa

SEQ ID NO: 2550 - DNA, 24 bp, Artificial Sequence
  Synthetic oligonucleotide
ctgaagaagaatcaccaggagtca

SEQ ID NO: 2551 - DNA, 25 bp, Artificial Sequence
  Synthetic oligonucleotide
gctgtccaacctgaagaagaatcac

SEQ ID NO: 2552 - DNA, 24 bp, Artificial Sequence
  Synthetic oligonucleotide
gctgtccaacctgaagaagaatca

SEQ ID NO: 2553 - DNA, 25 bp, Artificial Sequence
  Synthetic oligonucleotide
gctgtccaacctgaagaagaatcac

SEQ ID NO: 2554 - DNA, 24 bp, Artificial Sequence
  Synthetic oligonucleotide
agctgtccaacctgaagaagaatc

SEQ ID NO: 2555 - DNA, 24 bp, Artificial Sequence
  Synthetic oligonucleotide
gctgtccaacctgaagaagaatca

SEQ ID NO: 2556 - DNA, 24 bp, Artificial Sequence
  Synthetic oligonucleotide
cagctgtccaacctgaagaagaat

SEQ ID NO: 2557 - DNA, 24 bp, Artificial Sequence
  Synthetic oligonucleotide
agctgtccaacctgaagaagaatc

SEQ ID NO: 2558 - DNA, 23 bp, Artificial Sequence
  Synthetic oligonucleotide
cagctgtccaacctgaagaagaa

SEQ ID NO: 2559 - DNA, 24 bp, Artificial Sequence
  Synthetic oligonucleotide
cagctgtccaacctgaagaagaat

SEQ ID NO: 2560 - DNA, 25 bp, Artificial Sequence
  Synthetic oligonucleotide
gtaggacagggttatcaaacctctt

SEQ ID NO: 2561 - DNA, 25 bp, Artificial Sequence
  Synthetic oligonucleotide
gtaggacagggttatcaaacctctt

SEQ ID NO: 2562 - DNA, 24 bp, Artificial Sequence
  Synthetic oligonucleotide
tggtaggacagggttatcaaacct

SEQ ID NO: 2563 - DNA, 25 bp, Artificial Sequence
  Synthetic oligonucleotide
ctgaagaagaatcaccaggagtcaa

SEQ ID NO: 2564 - DNA, 25 bp, Artificial Sequence
  Synthetic oligonucleotide
ctctgaactcactttccatccaact

SEQ ID NO: 2565 - DNA, 31 bp, Artificial Sequence; identical to SEQ ID NO: 2331
  Synthetic oligonucleotide

SEQ ID NO: 2566 - DNA, 27 bp, Artificial Sequence
  Synthetic oligonucleotide
gggttggaaaccatatgattgtaaagg

SEQ ID NO: 2567 - DNA, 28 bp, Artificial Sequence
  Synthetic oligonucleotide
agtgggttggaaaccatatgattgtaaa

SEQ ID NO: 2568 - DNA, 29 bp, Artificial Sequence
  Synthetic oligonucleotide
gggttggaaaccatatgattgtaaaggaa

SEQ ID NO: 2569 - DNA, 28 bp, Artificial Sequence
  Synthetic oligonucleotide
gggttggaaaccatatgattgtaaagga

SEQ ID NO: 2570 - DNA, 27 bp, Artificial Sequence
  Synthetic oligonucleotide
gggttggaaaccatatgattgtaaagg

SEQ ID NO: 2571 - DNA, 29 bp, Artificial Sequence
  Synthetic oligonucleotide
ggttggaaaccatatgattgtaaaggaaa

SEQ ID NO: 2572 - DNA, 30 bp, Artificial Sequence
  Synthetic oligonucleotide
ggttggaaaccatatgattgtaaaggaaag

SEQ ID NO: 2573 - DNA, 28 bp, Artificial Sequence
  Synthetic oligonucleotide
gtgggttggaaaccatatgattgtaaag

SEQ ID NO: 2574 - DNA, 30 bp, Artificial Sequence
  Synthetic oligonucleotide
gttggaaaccatatgattgtaaaggaaagt

SEQ ID NO: 2575 - DNA, 28 bp, Artificial Sequence
  Synthetic oligonucleotide
agtgggttggaaaccatatgattgtaaa

SEQ ID NO: 2576 - DNA, 29 bp, Artificial Sequence
  Synthetic oligonucleotide
gggttggaaaccatatgattgtaaaggaa

SEQ ID NO: 2577 - DNA, 28 bp, Artificial Sequence
  Synthetic oligonucleotide
gggttggaaaccatatgattgtaaagga

SEQ ID NO: 2578 - DNA, 27 bp, Artificial Sequence
  Synthetic oligonucleotide
gggttggaaaccatatgattgtaaagg

SEQ ID NO: 2579 - DNA, 29 bp, Artificial Sequence
  Synthetic oligonucleotide
ggttggaaaccatatgattgtaaaggaaa

SEQ ID NO: 2580 - DNA, 30 bp, Artificial Sequence; identical to SEQ ID NO: 2572
  Synthetic oligonucleotide

SEQ ID NO: 2581 - DNA, 28 bp, Artificial Sequence
  Synthetic oligonucleotide
agtgggttggaaaccatatgattgtaaa

SEQ ID NO: 2582 - DNA, 28 bp, Artificial Sequence
  Synthetic oligonucleotide
gtgggttggaaaccatatgattgtaaag

SEQ ID NO: 2583 - DNA, 30 bp, Artificial Sequence; identical to SEQ ID NO: 2574
  Synthetic oligonucleotide

SEQ ID NO: 2584 - DNA, 29 bp, Artificial Sequence
  Synthetic oligonucleotide
gggttggaaaccatatgattgtaaaggaa

SEQ ID NO: 2585 - DNA, 28 bp, Artificial Sequence
  Synthetic oligonucleotide
gggttggaaaccatatgattgtaaagga

SEQ ID NO: 2586 - DNA, 27 bp, Artificial Sequence
  Synthetic oligonucleotide
gggttggaaaccatatgattgtaaagg

SEQ ID NO: 2587 - DNA, 29 bp, Artificial Sequence
  Synthetic oligonucleotide
ggttggaaaccatatgattgtaaaggaaa

SEQ ID NO: 2588 - DNA, 30 bp, Artificial Sequence; identical to SEQ ID NO: 2572
  Synthetic oligonucleotide

SEQ ID NO: 2589 - DNA, 28 bp, Artificial Sequence
  Synthetic oligonucleotide
gtgggttggaaaccatatgattgtaaag

SEQ ID NO: 2590 - DNA, 30 bp, Artificial Sequence; identical to SEQ ID NO: 2574
  Synthetic oligonucleotide

SEQ ID NO: 2591 - DNA, 28 bp, Artificial Sequence
  Synthetic oligonucleotide
agtgggttggaaaccatatgattgtaaa

SEQ ID NO: 2592 - DNA, 29 bp, Artificial Sequence
  Synthetic oligonucleotide
gggttggaaaccatatgattgtaaaggaa

SEQ ID NO: 2593 - DNA, 28 bp, Artificial Sequence
  Synthetic oligonucleotide
gggttggaaaccatatgattgtaaagga

SEQ ID NO: 2594 - DNA, 29 bp, Artificial Sequence
  Synthetic oligonucleotide
ggttggaaaccatatgattgtaaaggaaa

SEQ ID NO: 2595 - DNA, 30 bp, Artificial Sequence; identical to SEQ ID NO: 2574
  Synthetic oligonucleotide

SEQ ID NO: 2596 - DNA, 27 bp, Artificial Sequence
  Synthetic oligonucleotide
gggttggaaaccatatgattgtaaagg

SEQ ID NO: 2597 - DNA, 27 bp, Artificial Sequence
  Synthetic oligonucleotide
gggttggaaaccatatgattgtaaagg

SEQ ID NO: 2598 - DNA, 24 bp, Artificial Sequence
  Synthetic oligonucleotide
cactgacaccaccaaaagaacatg

SEQ ID NO: 2599 - DNA, 22 bp, Artificial Sequence
  Synthetic oligonucleotide
ctgacaccaccaaaagaacatg

SEQ ID NO: 2600 - DNA, 24 bp, Artificial Sequence
  Synthetic oligonucleotide
cactgacaccaccaaaagaacatg

SEQ ID NO: 2601 - DNA, 22 bp, Artificial Sequence
  Synthetic oligonucleotide
ctgacaccaccaaaagaacatg

SEQ ID NO: 2602 - DNA, 24 bp, Artificial Sequence
  Synthetic oligonucleotide
cactgacaccaccaaaagaacatg

SEQ ID NO: 2603 - DNA, 22 bp, Artificial Sequence
  Synthetic oligonucleotide
ctgacaccaccaaaagaacatg

SEQ ID NO: 2604 - DNA, 24 bp, Artificial Sequence
  Synthetic oligonucleotide
cactgacaccaccaaaagaacatg

SEQ ID NO: 2605 - DNA, 22 bp, Artificial Sequence
  Synthetic oligonucleotide
ctgacaccaccaaaagaacatg

SEQ ID NO: 2606 - DNA, 26 bp, Artificial Sequence
  Synthetic oligonucleotide
gctgagagacatattcaaaagtgcaa

SEQ ID NO: 2607 - DNA, 26 bp, Artificial Sequence
  Synthetic oligonucleotide
gctgagagacatattcaaaagtgcaa

SEQ ID NO: 2608 - DNA, 26 bp, Artificial Sequence
  Synthetic oligonucleotide
gctgagagacatattcaaaagtgcaa

SEQ ID NO: 2609 - DNA, 15 bp, Artificial Sequence
  Synthetic oligonucleotide
aaactctgaactcac

SEQ ID NO: 2610 - DNA, 20 bp, Artificial Sequence
  Synthetic oligonucleotide
agaataaactctgaactcac

SEQ ID NO: 2611 - DNA, 26 bp, Artificial Sequence
  Synthetic oligonucleotide
gctgagagacatattcaaaagtgcaa

SEQ ID NO: 2612 - DNA, 26 bp, Artificial Sequence
  Synthetic oligonucleotide
gctgagagacatattcaaaagtgcaa

SEQ ID NO: 2613 - DNA, 29 bp, Artificial Sequence
  Synthetic oligonucleotide
agtactactactctgtatggttggtaacc

SEQ ID NO: 2614 - DNA, 15 bp, Artificial Sequence
  Synthetic oligonucleotide
ttggacctttggtgc

SEQ ID NO: 2615 - DNA, 17 bp, Artificial Sequence
  Synthetic oligonucleotide
tggttggacctttggtg

SEQ ID NO: 2616 - DNA, 23 bp, Artificial Sequence
  Synthetic oligonucleotide
agatgcaaatctggtggcgttaa

SEQ ID NO: 2617 - DNA, 31 bp, Artificial Sequence
  Synthetic oligonucleotide
tcaaaaggtttgagattagacttcctaaaca

SEQ ID NO: 2618 - DNA, 24 bp, Artificial Sequence
  Synthetic oligonucleotide
ttgtgcaaaaacttcttgggtgtt

SEQ ID NO: 2619 - DNA, 24 bp, Artificial Sequence
  Synthetic oligonucleotide
ttgtgcaaaaacttcttgggtgtt

SEQ ID NO: 2620 - DNA, 21 bp, Artificial Sequence
  Synthetic oligonucleotide
ccattggtcccagagacatgt

SEQ ID NO: 2621 - DNA, 25 bp, Artificial Sequence
  Synthetic oligonucleotide
tcttagtaccattggtcccagagac

SEQ ID NO: 2622 - DNA, 27 bp, Artificial Sequence
  Synthetic oligonucleotide
ccatcattaaatggtaggacagggtta

SEQ ID NO: 2623 - DNA, 27 bp, Artificial Sequence
  Synthetic oligonucleotide
ccatcattaaatggtaggacagggtta

SEQ ID NO: 2624 - DNA, 26 bp, Artificial Sequence
  Synthetic oligonucleotide
ggttgcaaaggatcataaactgtgtt

SEQ ID NO: 2625 - DNA, 25 bp, Artificial Sequence
  Synthetic oligonucleotide
cgcagcctgtaaaatcatctggtaa

SEQ ID NO: 2626 - DNA, 25 bp, Artificial Sequence
  Synthetic oligonucleotide
agctataacgcagcctgtaaaatca

SEQ ID NO: 2627 - DNA, 26 bp, Artificial Sequence
  Synthetic oligonucleotide
agctataacgcagcctgtaaaatcat

SEQ ID NO: 2628 - DNA, 26 bp, Artificial Sequence
  Synthetic oligonucleotide
caagctataacgcagcctgtaaaatc

SEQ ID NO: 2629 - DNA, 25 bp, Artificial Sequence
  Synthetic oligonucleotide
cgcagcctgtaaaatcatctggtaa

SEQ ID NO: 2630 - DNA, 24 bp, Artificial Sequence
  Synthetic oligonucleotide
cgcagcctgtaaaatcatctggta

SEQ ID NO: 2631 - DNA, 26 bp, Artificial Sequence
  Synthetic oligonucleotide
cgcagcctgtaaaatcatctggtaat

SEQ ID NO: 2632 - DNA, 27 bp, Artificial Sequence
  Synthetic oligonucleotide
ctataacgcagcctgtaaaatcatctg

SEQ ID NO: 2633 - DNA, 26 bp, Artificial Sequence
  Synthetic oligonucleotide
gcagcctgtaaaatcatctggtaatt

SEQ ID NO: 2634 - DNA, 26 bp, Artificial Sequence
  Synthetic oligonucleotide
gctataacgcagcctgtaaaatcatc

SEQ ID NO: 2635 - DNA, 27 bp, Artificial Sequence
  Synthetic oligonucleotide
gctataacgcagcctgtaaaatcatct

SEQ ID NO: 2636 - DNA, 25 bp, Artificial Sequence
  Synthetic oligonucleotide
agctataacgcagcctgtaaaatca

SEQ ID NO: 2637 - DNA, 26 bp, Artificial Sequence
  Synthetic oligonucleotide
agctataacgcagcctgtaaaatcat

SEQ ID NO: 2638 - DNA, 26 bp, Artificial Sequence
  Synthetic oligonucleotide
caagctataacgcagcctgtaaaatc

SEQ ID NO: 2639 - DNA, 25 bp, Artificial Sequence
  Synthetic oligonucleotide
cgcagcctgtaaaatcatctggtaa

SEQ ID NO: 2640 - DNA, 24 bp, Artificial Sequence
  Synthetic oligonucleotide
cgcagcctgtaaaatcatctggta

SEQ ID NO: 2641 - DNA, 26 bp, Artificial Sequence
  Synthetic oligonucleotide
cgcagcctgtaaaatcatctggtaat

SEQ ID NO: 2642 - DNA, 27 bp, Artificial Sequence
  Synthetic oligonucleotide
ctataacgcagcctgtaaaatcatctg

SEQ ID NO: 2643 - DNA, 26 bp, Artificial Sequence
  Synthetic oligonucleotide
gcagcctgtaaaatcatctggtaatt

SEQ ID NO: 2644 - DNA, 26 bp, Artificial Sequence
  Synthetic oligonucleotide
gctataacgcagcctgtaaaatcatc

SEQ ID NO: 2645 - DNA, 27 bp, Artificial Sequence
  Synthetic oligonucleotide
gctataacgcagcctgtaaaatcatct

SEQ ID NO: 2646 - DNA, 25 bp, Artificial Sequence
  Synthetic oligonucleotide
agctataacgcagcctgtaaaatca

SEQ ID NO: 2647 - DNA, 26 bp, Artificial Sequence
  Synthetic oligonucleotide
agctataacgcagcctgtaaaatcat

SEQ ID NO: 2648 - DNA, 26 bp, Artificial Sequence
  Synthetic oligonucleotide
caagctataacgcagcctgtaaaatc

SEQ ID NO: 2649 - DNA, 25 bp, Artificial Sequence
  Synthetic oligonucleotide
cgcagcctgtaaaatcatctggtaa

SEQ ID NO: 2650 - DNA, 24 bp, Artificial Sequence
  Synthetic oligonucleotide
cgcagcctgtaaaatcatctggta

SEQ ID NO: 2651 - DNA, 26 bp, Artificial Sequence
  Synthetic oligonucleotide
cgcagcctgtaaaatcatctggtaat

SEQ ID NO: 2652 - DNA, 27 bp, Artificial Sequence
  Synthetic oligonucleotide
ctataacgcagcctgtaaaatcatctg

SEQ ID NO: 2653 - DNA, 26 bp, Artificial Sequence
  Synthetic oligonucleotide
gcagcctgtaaaatcatctggtaatt

SEQ ID NO: 2654 - DNA, 26 bp, Artificial Sequence
  Synthetic oligonucleotide
gctataacgcagcctgtaaaatcatc

SEQ ID NO: 2655 - DNA, 27 bp, Artificial Sequence
  Synthetic oligonucleotide
gctataacgcagcctgtaaaatcatct

SEQ ID NO: 2656 - DNA, 25 bp, Artificial Sequence
  Synthetic oligonucleotide
agctataacgcagcctgtaaaatca

SEQ ID NO: 2657 - DNA, 26 bp, Artificial Sequence
  Synthetic oligonucleotide
agctataacgcagcctgtaaaatcat

SEQ ID NO: 2658 - DNA, 26 bp, Artificial Sequence
  Synthetic oligonucleotide
caagctataacgcagcctgtaaaatc

SEQ ID NO: 2659 - DNA, 25 bp, Artificial Sequence
  Synthetic oligonucleotide
cgcagcctgtaaaatcatctggtaa

SEQ ID NO: 2660 - DNA, 24 bp, Artificial Sequence
  Synthetic oligonucleotide
cgcagcctgtaaaatcatctggta

SEQ ID NO: 2661 - DNA, 26 bp, Artificial Sequence
  Synthetic oligonucleotide
cgcagcctgtaaaatcatctggtaat

SEQ ID NO: 2662 - DNA, 27 bp, Artificial Sequence
  Synthetic oligonucleotide
ctataacgcagcctgtaaaatcatctg

SEQ ID NO: 2663 - DNA, 26 bp, Artificial Sequence
  Synthetic oligonucleotide
gcagcctgtaaaatcatctggtaatt

SEQ ID NO: 2664 - DNA, 26 bp, Artificial Sequence
  Synthetic oligonucleotide
gctataacgcagcctgtaaaatcatc

SEQ ID NO: 2665 - DNA, 27 bp, Artificial Sequence
  Synthetic oligonucleotide
gctataacgcagcctgtaaaatcatct

SEQ ID NO: 2666 - DNA, 25 bp, Artificial Sequence
  Synthetic oligonucleotide
agctataacgcagcctgtaaaatca

SEQ ID NO: 2667 - DNA, 26 bp, Artificial Sequence
  Synthetic oligonucleotide
agctataacgcagcctgtaaaatcat

SEQ ID NO: 2668 - DNA, 26 bp, Artificial Sequence
  Synthetic oligonucleotide
caagctataacgcagcctgtaaaatc

SEQ ID NO: 2669 - DNA, 25 bp, Artificial Sequence
  Synthetic oligonucleotide
cgcagcctgtaaaatcatctggtaa

SEQ ID NO: 2670 - DNA, 24 bp, Artificial Sequence
  Synthetic oligonucleotide
cgcagcctgtaaaatcatctggta

SEQ ID NO: 2671 - DNA, 26 bp, Artificial Sequence
  Synthetic oligonucleotide
cgcagcctgtaaaatcatctggtaat

SEQ ID NO: 2672 - DNA, 27 bp, Artificial Sequence
  Synthetic oligonucleotide
ctataacgcagcctgtaaaatcatctg

SEQ ID NO: 2673 - DNA, 26 bp, Artificial Sequence
  Synthetic oligonucleotide
gcagcctgtaaaatcatctggtaatt

SEQ ID NO: 2674 - DNA, 26 bp, Artificial Sequence
  Synthetic oligonucleotide
gctataacgcagcctgtaaaatcatc

SEQ ID NO: 2675 - DNA, 27 bp, Artificial Sequence
  Synthetic oligonucleotide
gctataacgcagcctgtaaaatcatct

SEQ ID NO: 2676 - DNA, 25 bp, Artificial Sequence
  Synthetic oligonucleotide
agctataacgcagcctgtaaaatca

SEQ ID NO: 2677 - DNA, 26 bp, Artificial Sequence
  Synthetic oligonucleotide
agctataacgcagcctgtaaaatcat

SEQ ID NO: 2678 - DNA, 26 bp, Artificial Sequence
  Synthetic oligonucleotide
caagctataacgcagcctgtaaaatc

SEQ ID NO: 2679 - DNA, 25 bp, Artificial Sequence
  Synthetic oligonucleotide
cgcagcctgtaaaatcatctggtaa

SEQ ID NO: 2680 - DNA, 24 bp, Artificial Sequence
  Synthetic oligonucleotide
cgcagcctgtaaaatcatctggta

SEQ ID NO: 2681 - DNA, 26 bp, Artificial Sequence
  Synthetic oligonucleotide
cgcagcctgtaaaatcatctggtaat

SEQ ID NO: 2682 - DNA, 26 bp, Artificial Sequence
  Synthetic oligonucleotide
gcagcctgtaaaatcatctggtaatt

SEQ ID NO: 2683 - DNA, 26 bp, Artificial Sequence
  Synthetic oligonucleotide
gctataacgcagcctgtaaaatcatc

SEQ ID NO: 2684 - DNA, 27 bp, Artificial Sequence
  Synthetic oligonucleotide
gctataacgcagcctgtaaaatcatct

SEQ ID NO: 2685 - DNA, 25 bp, Artificial Sequence
  Synthetic oligonucleotide
agctataacgcagcctgtaaaatca

SEQ ID NO: 2686 - DNA, 26 bp, Artificial Sequence
  Synthetic oligonucleotide
agctataacgcagcctgtaaaatcat

SEQ ID NO: 2687 - DNA, 26 bp, Artificial Sequence
  Synthetic oligonucleotide
caagctataacgcagcctgtaaaatc

SEQ ID NO: 2688 - DNA, 25 bp, Artificial Sequence
  Synthetic oligonucleotide
cgcagcctgtaaaatcatctggtaa

SEQ ID NO: 2689 - DNA, 24 bp, Artificial Sequence
  Synthetic oligonucleotide
cgcagcctgtaaaatcatctggta

SEQ ID NO: 2690 - DNA, 26 bp, Artificial Sequence
  Synthetic oligonucleotide
cgcagcctgtaaaatcatctggtaat

SEQ ID NO: 2691 - DNA, 26 bp, Artificial Sequence
  Synthetic oligonucleotide
gcagcctgtaaaatcatctggtaatt

SEQ ID NO: 2692 - DNA, 26 bp, Artificial Sequence
  Synthetic oligonucleotide
gctataacgcagcctgtaaaatcatc

SEQ ID NO: 2693 - DNA, 25 bp, Artificial Sequence
  Synthetic oligonucleotide
cgcagcctgtaaaatcatctggtaa

SEQ ID NO: 2694 - DNA, 25 bp, Artificial Sequence
  Synthetic oligonucleotide
agctataacgcagcctgtaaaatca

SEQ ID NO: 2695 - DNA, 26 bp, Artificial Sequence
  Synthetic oligonucleotide
agctataacgcagcctgtaaaatcat

SEQ ID NO: 2696 - DNA, 26 bp, Artificial Sequence
  Synthetic oligonucleotide
caagctataacgcagcctgtaaaatc

SEQ ID NO: 2697 - DNA, 25 bp, Artificial Sequence
  Synthetic oligonucleotide
cgcagcctgtaaaatcatctggtaa

SEQ ID NO: 2698 - DNA, 24 bp, Artificial Sequence
  Synthetic oligonucleotide
cgcagcctgtaaaatcatctggta

SEQ ID NO: 2699 - DNA, 26 bp, Artificial Sequence
  Synthetic oligonucleotide
cgcagcctgtaaaatcatctggtaat

SEQ ID NO: 2700 - DNA, 27 bp, Artificial Sequence
  Synthetic oligonucleotide
ctataacgcagcctgtaaaatcatctg

SEQ ID NO: 2701 - DNA, 26 bp, Artificial Sequence
  Synthetic oligonucleotide
gcagcctgtaaaatcatctggtaatt

SEQ ID NO: 2702 - DNA, 26 bp, Artificial Sequence
  Synthetic oligonucleotide
gctataacgcagcctgtaaaatcatc

SEQ ID NO: 2703 - DNA, 27 bp, Artificial Sequence
  Synthetic oligonucleotide
gctataacgcagcctgtaaaatcatct

SEQ ID NO: 2704 - DNA, 25 bp, Artificial Sequence
  Synthetic oligonucleotide
agctataacgcagcctgtaaaatca

SEQ ID NO: 2705 - DNA, 26 bp, Artificial Sequence
  Synthetic oligonucleotide
agctataacgcagcctgtaaaatcat

SEQ ID NO: 2706 - DNA, 26 bp, Artificial Sequence
  Synthetic oligonucleotide
caagctataacgcagcctgtaaaatc

SEQ ID NO: 2707 - DNA, 25 bp, Artificial Sequence
  Synthetic oligonucleotide
cgcagcctgtaaaatcatctggtaa

SEQ ID NO: 2708 - DNA, 24 bp, Artificial Sequence
  Synthetic oligonucleotide
cgcagcctgtaaaatcatctggta

SEQ ID NO: 2709 - DNA, 26 bp, Artificial Sequence
  Synthetic oligonucleotide
cgcagcctgtaaaatcatctggtaat

SEQ ID NO: 2710 - DNA, 27 bp, Artificial Sequence
  Synthetic oligonucleotide
ctataacgcagcctgtaaaatcatctg

SEQ ID NO: 2711 - DNA, 26 bp, Artificial Sequence
  Synthetic oligonucleotide
gcagcctgtaaaatcatctggtaatt

SEQ ID NO: 2712 - DNA, 26 bp, Artificial Sequence
  Synthetic oligonucleotide
gctataacgcagcctgtaaaatcatc

SEQ ID NO: 2713 - DNA, 27 bp, Artificial Sequence
  Synthetic oligonucleotide
gctataacgcagcctgtaaaatcatct

SEQ ID NO: 2714 - DNA, 25 bp, Artificial Sequence
  Synthetic oligonucleotide
agctataacgcagcctgtaaaatca

SEQ ID NO: 2715 - DNA, 26 bp, Artificial Sequence
  Synthetic oligonucleotide
agctataacgcagcctgtaaaatcat

SEQ ID NO: 2716 - DNA, 26 bp, Artificial Sequence
  Synthetic oligonucleotide
caagctataacgcagcctgtaaaatc

SEQ ID NO: 2717 - DNA, 25 bp, Artificial Sequence
  Synthetic oligonucleotide
cgcagcctgtaaaatcatctggtaa

SEQ ID NO: 2718 - DNA, 24 bp, Artificial Sequence
  Synthetic oligonucleotide
cgcagcctgtaaaatcatctggta

SEQ ID NO: 2719 - DNA, 26 bp, Artificial Sequence
  Synthetic oligonucleotide
cgcagcctgtaaaatcatctggtaat

SEQ ID NO: 2720 - DNA, 27 bp, Artificial Sequence
  Synthetic oligonucleotide
ctataacgcagcctgtaaaatcatctg

SEQ ID NO: 2721 - DNA, 26 bp, Artificial Sequence
  Synthetic oligonucleotide
gcagcctgtaaaatcatctggtaatt

SEQ ID NO: 2722 - DNA, 26 bp, Artificial Sequence
  Synthetic oligonucleotide
gctataacgcagcctgtaaaatcatc

SEQ ID NO: 2723 - DNA, 27 bp, Artificial Sequence
  Synthetic oligonucleotide
gctataacgcagcctgtaaaatcatct

SEQ ID NO: 2724 - DNA, 25 bp, Artificial Sequence
  Synthetic oligonucleotide
agctataacgcagcctgtaaaatca

SEQ ID NO: 2725 - DNA, 26 bp, Artificial Sequence
  Synthetic oligonucleotide
agctataacgcagcctgtaaaatcat

SEQ ID NO: 2726 - DNA, 26 bp, Artificial Sequence
  Synthetic oligonucleotide
caagctataacgcagcctgtaaaatc

SEQ ID NO: 2727 - DNA, 25 bp, Artificial Sequence
  Synthetic oligonucleotide
cgcagcctgtaaaatcatctggtaa

SEQ ID NO: 2728 - DNA, 24 bp, Artificial Sequence
  Synthetic oligonucleotide
cgcagcctgtaaaatcatctggta

SEQ ID NO: 2729 - DNA, 26 bp, Artificial Sequence
  Synthetic oligonucleotide
cgcagcctgtaaaatcatctggtaat

SEQ ID NO: 2730 - DNA, 27 bp, Artificial Sequence
  Synthetic oligonucleotide
ctataacgcagcctgtaaaatcatctg

SEQ ID NO: 2731 - DNA, 26 bp, Artificial Sequence
  Synthetic oligonucleotide
gcagcctgtaaaatcatctggtaatt

SEQ ID NO: 2732 - DNA, 26 bp, Artificial Sequence
  Synthetic oligonucleotide
gctataacgcagcctgtaaaatcatc

SEQ ID NO: 2733 - DNA, 27 bp, Artificial Sequence
  Synthetic oligonucleotide
gctataacgcagcctgtaaaatcatct

SEQ ID NO: 2734 - DNA, 25 bp, Artificial Sequence
  Synthetic oligonucleotide
agctataacgcagcctgtaaaatca

SEQ ID NO: 2735 - DNA, 26 bp, Artificial Sequence
  Synthetic oligonucleotide
agctataacgcagcctgtaaaatcat

SEQ ID NO: 2736 - DNA, 26 bp, Artificial Sequence
  Synthetic oligonucleotide
caagctataacgcagcctgtaaaatc

SEQ ID NO: 2737 - DNA, 25 bp, Artificial Sequence
  Synthetic oligonucleotide
cgcagcctgtaaaatcatctggtaa

SEQ ID NO: 2738 - DNA, 24 bp, Artificial Sequence
  Synthetic oligonucleotide
cgcagcctgtaaaatcatctggta

SEQ ID NO: 2739 - DNA, 26 bp, Artificial Sequence
  Synthetic oligonucleotide
cgcagcctgtaaaatcatctggtaat

SEQ ID NO: 2740 - DNA, 26 bp, Artificial Sequence
  Synthetic oligonucleotide
gcagcctgtaaaatcatctggtaatt

SEQ ID NO: 2741 - DNA, 26 bp, Artificial Sequence
  Synthetic oligonucleotide
gctataacgcagcctgtaaaatcatc

SEQ ID NO: 2742 - DNA, 27 bp, Artificial Sequence
  Synthetic oligonucleotide
gctataacgcagcctgtaaaatcatct

SEQ ID NO: 2743 - DNA, 25 bp, Artificial Sequence
  Synthetic oligonucleotide
agctataacgcagcctgtaaaatca

SEQ ID NO: 2744 - DNA, 26 bp, Artificial Sequence
  Synthetic oligonucleotide
agctataacgcagcctgtaaaatcat

SEQ ID NO: 2745 - DNA, 26 bp, Artificial Sequence
  Synthetic oligonucleotide
caagctataacgcagcctgtaaaatc

SEQ ID NO: 2746 - DNA, 25 bp, Artificial Sequence
  Synthetic oligonucleotide
cgcagcctgtaaaatcatctggtaa

SEQ ID NO: 2747 - DNA, 24 bp, Artificial Sequence
  Synthetic oligonucleotide
cgcagcctgtaaaatcatctggta

SEQ ID NO: 2748 - DNA, 26 bp, Artificial Sequence
  Synthetic oligonucleotide
cgcagcctgtaaaatcatctggtaat

SEQ ID NO: 2749 - DNA, 26 bp, Artificial Sequence
  Synthetic oligonucleotide
gcagcctgtaaaatcatctggtaatt

SEQ ID NO: 2750 - DNA, 26 bp, Artificial Sequence
  Synthetic oligonucleotide
gctataacgcagcctgtaaaatcatc

SEQ ID NO: 2751 - DNA, 25 bp, Artificial Sequence
  Synthetic oligonucleotide
cgcagcctgtaaaatcatctggtaa

SEQ ID NO: 2752 - DNA, 33 bp, Artificial Sequence
  Synthetic oligonucleotide
caaaaggtttgagattagacttcctaaacaatc

SEQ ID NO: 2753 - DNA, 26 bp, Artificial Sequence
  Synthetic oligonucleotide
cacgtgtgaaagaattagtgtatgca

SEQ ID NO: 2754 - DNA, 26 bp, Artificial Sequence
  Synthetic oligonucleotide
cacgtgtgaaagaattagtgtatgca

SEQ ID NO: 2755 - DNA, 26 bp, Artificial Sequence
  Synthetic oligonucleotide
cacgtgtgaaagaattagtgtatgca

SEQ ID NO: 2756 - DNA, 26 bp, Artificial Sequence
  Synthetic oligonucleotide
cacgtgtgaaagaattagtgtatgca

SEQ ID NO: 2757 - DNA, 23 bp, Artificial Sequence
  Synthetic oligonucleotide
cagctgtccaacctgaagaagaa

SEQ ID NO: 2758 - DNA, 25 bp, Artificial Sequence
  Synthetic oligonucleotide
ctgaagaagaatcaccaggagtcaa

SEQ ID NO: 2759 - DNA, 25 bp, Artificial Sequence
  Synthetic oligonucleotide
gaagaagaatcaccaggagtcaaat

SEQ ID NO: 2760 - DNA, 26 bp, Artificial Sequence
  Synthetic oligonucleotide
ctgaagaagaatcaccaggagtcaaa

SEQ ID NO: 2761 - DNA, 25 bp, Artificial Sequence
  Synthetic oligonucleotide
ctgaagaagaatcaccaggagtcaa

SEQ ID NO: 2762 - DNA, 24 bp, Artificial Sequence
  Synthetic oligonucleotide
ctgaagaagaatcaccaggagtca

SEQ ID NO: 2763 - DNA, 25 bp, Artificial Sequence
  Synthetic oligonucleotide
gctgtccaacctgaagaagaatcac

SEQ ID NO: 2764 - DNA, 26 bp, Artificial Sequence
  Synthetic oligonucleotide
ctgaagaagaatcaccaggagtcaaa

SEQ ID NO: 2765 - DNA, 25 bp, Artificial Sequence
  Synthetic oligonucleotide
ctgaagaagaatcaccaggagtcaa

SEQ ID NO: 2766 - DNA, 24 bp, Artificial Sequence
  Synthetic oligonucleotide
ctgaagaagaatcaccaggagtca

SEQ ID NO: 2767 - DNA, 25 bp, Artificial Sequence
  Synthetic oligonucleotide
gctgtccaacctgaagaagaatcac

SEQ ID NO: 2768 - DNA, 26 bp, Artificial Sequence
  Synthetic oligonucleotide
ctgaagaagaatcaccaggagtcaaa

SEQ ID NO: 2769 - DNA, 25 bp, Artificial Sequence
  Synthetic oligonucleotide
ctgaagaagaatcaccaggagtcaa

SEQ ID NO: 2770 - DNA, 24 bp, Artificial Sequence
  Synthetic oligonucleotide
ctgaagaagaatcaccaggagtca

SEQ ID NO: 2771 - DNA, 27 bp, Artificial Sequence
  Synthetic oligonucleotide
ctgaagaagaatcaccaggagtcaaat

SEQ ID NO: 2772 - DNA, 25 bp, Artificial Sequence
  Synthetic oligonucleotide
gctgtccaacctgaagaagaatcac

SEQ ID NO: 2773 - DNA, 26 bp, Artificial Sequence
  Synthetic oligonucleotide
ctgaagaagaatcaccaggagtcaaa

SEQ ID NO: 2774 - DNA, 25 bp, Artificial Sequence
  Synthetic oligonucleotide
ctgaagaagaatcaccaggagtcaa

SEQ ID NO: 2775 - DNA, 24 bp, Artificial Sequence
  Synthetic oligonucleotide
ctgaagaagaatcaccaggagtca

SEQ ID NO: 2776 - DNA, 27 bp, Artificial Sequence
  Synthetic oligonucleotide
ctgaagaagaatcaccaggagtcaaat

SEQ ID NO: 2777 - DNA, 25 bp, Artificial Sequence
  Synthetic oligonucleotide
gctgtccaacctgaagaagaatcac

SEQ ID NO: 2778 - DNA, 26 bp, Artificial Sequence
  Synthetic oligonucleotide
ctgaagaagaatcaccaggagtcaaa

SEQ ID NO: 2779 - DNA, 25 bp, Artificial Sequence
  Synthetic oligonucleotide
ctgaagaagaatcaccaggagtcaa

SEQ ID NO: 2780 - DNA, 24 bp, Artificial Sequence
  Synthetic oligonucleotide
ctgaagaagaatcaccaggagtca

SEQ ID NO: 2781 - DNA, 25 bp, Artificial Sequence
  Synthetic oligonucleotide
gctgtccaacctgaagaagaatcac

SEQ ID NO: 2782 - DNA, 32 bp, Artificial Sequence; identical to SEQ ID NO: 2412
  Synthetic oligonucleotide

SEQ ID NO: 2783 - DNA, 32 bp, Artificial Sequence; identical to SEQ ID NO: 2412
  Synthetic oligonucleotide

SEQ ID NO: 2784 - DNA, 20 bp, Artificial Sequence
  Synthetic oligonucleotide
aacctcattgaggcggtcaa

SEQ ID NO: 2785 - DNA, 33 bp, Artificial Sequence; identical to SEQ ID NO: 2752
  Synthetic oligonucleotide

SEQ ID NO: 2786 - DNA, 33 bp, Artificial Sequence; identical to SEQ ID NO: 2752
  Synthetic oligonucleotide

SEQ ID NO: 2787 - DNA, 31 bp, Artificial Sequence; identical to SEQ ID NO: 2617
  Synthetic oligonucleotide

SEQ ID NO: 2788 - DNA, 31 bp, Artificial Sequence; identical to SEQ ID NO: 2617
  Synthetic oligonucleotide

SEQ ID NO: 2789 - DNA, 29 bp, Artificial Sequence
  Synthetic oligonucleotide
aaaaggtttgagattagacttcctaaaca

SEQ ID NO: 2790 - DNA, 31 bp, Artificial Sequence; identical to SEQ ID NO: 2617
  Synthetic oligonucleotide

SEQ ID NO: 2791 - DNA, 29 bp, Artificial Sequence
  Synthetic oligonucleotide
aaaaggtttgagattagacttcctaaaca

SEQ ID NO: 2792 - DNA, 32 bp, Artificial Sequence; identical to SEQ ID NO: 2412
  Synthetic oligonucleotide

SEQ ID NO: 2793 - DNA, 21 bp, Artificial Sequence
  Synthetic oligonucleotide
ctaccggcctgatagatttca

SEQ ID NO: 2794 - DNA, 22 bp, Artificial Sequence
  Synthetic oligonucleotide
gctaccggcctgatagatttca

SEQ ID NO: 2795 - DNA, 27 bp, Artificial Sequence
  Synthetic oligonucleotide
caattaaaaccttcaacaccattacaa

SEQ ID NO: 2796 - DNA, 31 bp, Artificial Sequence; identical to SEQ ID NO: 2328
  Synthetic oligonucleotide

SEQ ID NO: 2797 - DNA, 21 bp, Artificial Sequence
  Synthetic oligonucleotide
ctaccggcctgatagatttca

SEQ ID NO: 2798 - DNA, 21 bp, Artificial Sequence
  Synthetic oligonucleotide
ctaccggcctgatagatttca

SEQ ID NO: 2799 - DNA, 24 bp, Artificial Sequence
  Synthetic oligonucleotide
ccggcctgatagatttcagttgaa

SEQ ID NO: 2800 - DNA, 24 bp, Artificial Sequence
  Synthetic oligonucleotide
ccggcctgatagatttcagttgaa

SEQ ID NO: 2801 - DNA, 29 bp, Artificial Sequence
  Synthetic oligonucleotide
agtactactactctgtatggttggtaacc

SEQ ID NO: 2802 - DNA, 29 bp, Artificial Sequence
  Synthetic oligonucleotide
agtactactactctgtatggttggtaacc

SEQ ID NO: 2803 - DNA, 29 bp, Artificial Sequence
  Synthetic oligonucleotide
agtactactactctgtatggttggtaacc

SEQ ID NO: 2804 - DNA, 29 bp, Artificial Sequence
  Synthetic oligonucleotide
agtactactactctgtatggttggtaacc

SEQ ID NO: 2805 - DNA, 26 bp, Artificial Sequence
  Synthetic oligonucleotide
actactactctgtatggttggtaacc

SEQ ID NO: 2806 - DNA, 27 bp, Artificial Sequence
  Synthetic oligonucleotide
agtactactactctgtatggttggtaa

SEQ ID NO: 2807 - DNA, 25 bp, Artificial Sequence
  Synthetic oligonucleotide
tactactactctgtatggttggtaa

SEQ ID NO: 2808 - DNA, 24 bp, Artificial Sequence
  Synthetic oligonucleotide
tactactctgtatggttggtaacc

SEQ ID NO: 2809 - DNA, 24 bp, Artificial Sequence
  Synthetic oligonucleotide
gtactactactctgtatggttggt

SEQ ID NO: 2810 - DNA, 17 bp, Artificial Sequence
  Synthetic oligonucleotide
ctacactacgtccccgc

SEQ ID NO: 2811 - DNA, 26 bp, Artificial Sequence
  Synthetic oligonucleotide
tgatggattgactagctacactacgt

SEQ ID NO: 2812 - DNA, 26 bp, Artificial Sequence
  Synthetic oligonucleotide
tgatggattgactagctacactacgt

SEQ ID NO: 2813 - DNA, 26 bp, Artificial Sequence
  Synthetic oligonucleotide
tgtcttgttcaacagctattccagtt

SEQ ID NO: 2814 - DNA, 21 bp, Artificial Sequence
  Synthetic oligonucleotide
gagcaaaggtggcaaaacagt

SEQ ID NO: 2815 - DNA, 21 bp, Artificial Sequence
  Synthetic oligonucleotide
ctgtgagcaaaggtggcaaaa

SEQ ID NO: 2816 - DNA, 28 bp, Artificial Sequence
  Synthetic oligonucleotide
actttgtcaagacgtgaaaggatatcat

SEQ ID NO: 2817 - DNA, 28 bp, Artificial Sequence
  Synthetic oligonucleotide
actttgtcaagacgtgaaaggatatcat

SEQ ID NO: 2818 - DNA, 25 bp, Artificial Sequence
  Synthetic oligonucleotide
gggtaataaacaccacgtgtgaaag

SEQ ID NO: 2819 - DNA, 25 bp, Artificial Sequence
  Synthetic oligonucleotide
gggtaataaacaccacgtgtgaaag

SEQ ID NO: 2820 - DNA, 26 bp, Artificial Sequence
  Synthetic oligonucleotide
tgatggattgactagctacactacgt

SEQ ID NO: 2821 - DNA, 22 bp, Artificial Sequence
  Synthetic oligonucleotide
ggattgactagctacactacgt

SEQ ID NO: 2822 - DNA, 22 bp, Artificial Sequence
  Synthetic oligonucleotide
ggattgactagctacactacgt

SEQ ID NO: 2823 - DNA, 22 bp, Artificial Sequence
  Synthetic oligonucleotide
ggattgactagctacactacgt

SEQ ID NO: 2824 - DNA, 22 bp, Artificial Sequence
  Synthetic oligonucleotide
ggattgactagctacactacgt

SEQ ID NO: 2825 - DNA, 27 bp, Artificial Sequence
  Synthetic oligonucleotide
acatagtgtaggcaatgatggattgac

SEQ ID NO: 2826 - DNA, 25 bp, Artificial Sequence
  Synthetic oligonucleotide
gcaatgatggattgactagctacac

SEQ ID NO: 2827 - DNA, 27 bp, Artificial Sequence
  Synthetic oligonucleotide
gcaatgatggattgactagctacacta

SEQ ID NO: 2828 - DNA, 26 bp, Artificial Sequence
  Synthetic oligonucleotide
gcaatgatggattgactagctacact

SEQ ID NO: 2829 - DNA, 28 bp, Artificial Sequence
  Synthetic oligonucleotide
gcaatgatggattgactagctacactac

SEQ ID NO: 2830 - DNA, 25 bp, Artificial Sequence
  Synthetic oligonucleotide
ggcaatgatggattgactagctaca

SEQ ID NO: 2831 - DNA, 27 bp, Artificial Sequence
  Synthetic oligonucleotide
tgacatagtgtaggcaatgatggattg

SEQ ID NO: 2832 - DNA, 26 bp, Artificial Sequence
  Synthetic oligonucleotide
tgatggattgactagctacactacgt

SEQ ID NO: 2833 - DNA, 25 bp, Artificial Sequence
  Synthetic oligonucleotide
gcaatgatggattgactagctacac

SEQ ID NO: 2834 - DNA, 25 bp, Artificial Sequence
  Synthetic oligonucleotide
ggcaatgatggattgactagctaca

SEQ ID NO: 2835 - DNA, 26 bp, Artificial Sequence
  Synthetic oligonucleotide
tgatggattgactagctacactacgt

SEQ ID NO: 2836 - DNA, 27 bp, Artificial Sequence
  Synthetic oligonucleotide
acatagtgtaggcaatgatggattgac

SEQ ID NO: 2837 - DNA, 27 bp, Artificial Sequence
  Synthetic oligonucleotide
catagtgtaggcaatgatggattgact

SEQ ID NO: 2838 - DNA, 27 bp, Artificial Sequence
  Synthetic oligonucleotide
gacatagtgtaggcaatgatggattga

SEQ ID NO: 2839 - DNA, 26 bp, Artificial Sequence
  Synthetic oligonucleotide
gatggattgactagctacactacgtg

SEQ ID NO: 2840 - DNA, 25 bp, Artificial Sequence
  Synthetic oligonucleotide
gcaatgatggattgactagctacac

SEQ ID NO: 2841 - DNA, 27 bp, Artificial Sequence
  Synthetic oligonucleotide
gcaatgatggattgactagctacacta

SEQ ID NO: 2842 - DNA, 26 bp, Artificial Sequence
  Synthetic oligonucleotide
gcaatgatggattgactagctacact

SEQ ID NO: 2843 - DNA, 28 bp, Artificial Sequence
  Synthetic oligonucleotide
gcaatgatggattgactagctacactac

SEQ ID NO: 2844 - DNA, 25 bp, Artificial Sequence
  Synthetic oligonucleotide
ggcaatgatggattgactagctaca

SEQ ID NO: 2845 - DNA, 27 bp, Artificial Sequence
  Synthetic oligonucleotide
tgacatagtgtaggcaatgatggattg

SEQ ID NO: 2846 - DNA, 26 bp, Artificial Sequence
  Synthetic oligonucleotide
tgatggattgactagctacactacgt

SEQ ID NO: 2847 - DNA, 27 bp, Artificial Sequence
  Synthetic oligonucleotide
acatagtgtaggcaatgatggattgac

SEQ ID NO: 2848 - DNA, 27 bp, Artificial Sequence
  Synthetic oligonucleotide
catagtgtaggcaatgatggattgact

SEQ ID NO: 2849 - DNA, 26 bp, Artificial Sequence
  Synthetic oligonucleotide
tgatggattgactagctacactacgt

SEQ ID NO: 2850 - DNA, 27 bp, Artificial Sequence
  Synthetic oligonucleotide
gacatagtgtaggcaatgatggattga

SEQ ID NO: 2851 - DNA, 26 bp, Artificial Sequence
  Synthetic oligonucleotide
gatggattgactagctacactacgtg

SEQ ID NO: 2852 - DNA, 25 bp, Artificial Sequence
  Synthetic oligonucleotide
gcaatgatggattgactagctacac

SEQ ID NO: 2853 - DNA, 27 bp, Artificial Sequence
  Synthetic oligonucleotide
gcaatgatggattgactagctacacta

SEQ ID NO: 2854 - DNA, 26 bp, Artificial Sequence
  Synthetic oligonucleotide
gcaatgatggattgactagctacact

SEQ ID NO: 2855 - DNA, 28 bp, Artificial Sequence
  Synthetic oligonucleotide
gcaatgatggattgactagctacactac

SEQ ID NO: 2856 - DNA, 25 bp, Artificial Sequence
  Synthetic oligonucleotide
ggcaatgatggattgactagctaca

SEQ ID NO: 2857 - DNA, 25 bp, Artificial Sequence
  Synthetic oligonucleotide
gtaggcaatgatggattgactagct

SEQ ID NO: 2858 - DNA, 27 bp, Artificial Sequence
  Synthetic oligonucleotide
tgacatagtgtaggcaatgatggattg

SEQ ID NO: 2859 - DNA, 26 bp, Artificial Sequence
  Synthetic oligonucleotide
tgatggattgactagctacactacgt

SEQ ID NO: 2860 - DNA, 27 bp, Artificial Sequence
  Synthetic oligonucleotide
acatagtgtaggcaatgatggattgac

SEQ ID NO: 2861 - DNA, 27 bp, Artificial Sequence
  Synthetic oligonucleotide
gacatagtgtaggcaatgatggattga

SEQ ID NO: 2862 - DNA, 25 bp, Artificial Sequence
  Synthetic oligonucleotide
gcaatgatggattgactagctacac

SEQ ID NO: 2863 - DNA, 27 bp, Artificial Sequence
  Synthetic oligonucleotide
gcaatgatggattgactagctacacta

SEQ ID NO: 2864 - DNA, 26 bp, Artificial Sequence
  Synthetic oligonucleotide
gcaatgatggattgactagctacact

SEQ ID NO: 2865 - DNA, 25 bp, Artificial Sequence
  Synthetic oligonucleotide
ggcaatgatggattgactagctaca

SEQ ID NO: 2866 - DNA, 27 bp, Artificial Sequence
  Synthetic oligonucleotide
tgacatagtgtaggcaatgatggattg

SEQ ID NO: 2867 - DNA, 26 bp, Artificial Sequence
  Synthetic oligonucleotide
tgatggattgactagctacactacgt

SEQ ID NO: 2868 - DNA, 27 bp, Artificial Sequence
  Synthetic oligonucleotide
acatagtgtaggcaatgatggattgac

SEQ ID NO: 2869 - DNA, 27 bp, Artificial Sequence
  Synthetic oligonucleotide
gacatagtgtaggcaatgatggattga

SEQ ID NO: 2870 - DNA, 25 bp, Artificial Sequence
  Synthetic oligonucleotide
gcaatgatggattgactagctacac

SEQ ID NO: 2871 - DNA, 26 bp, Artificial Sequence
  Synthetic oligonucleotide
gcaatgatggattgactagctacact

SEQ ID NO: 2872 - DNA, 25 bp, Artificial Sequence
  Synthetic oligonucleotide
gtaggcaatgatggattgactagct

SEQ ID NO: 2873 - DNA, 27 bp, Artificial Sequence
  Synthetic oligonucleotide
acatagtgtaggcaatgatggattgac

SEQ ID NO: 2874 - DNA, 27 bp, Artificial Sequence
  Synthetic oligonucleotide
acatagtgtaggcaatgatggattgac

SEQ ID NO: 2875 - DNA, 27 bp, Artificial Sequence
  Synthetic oligonucleotide
catagtgtaggcaatgatggattgact

SEQ ID NO: 2876 - DNA, 27 bp, Artificial Sequence
  Synthetic oligonucleotide
gacatagtgtaggcaatgatggattga

SEQ ID NO: 2877 - DNA, 26 bp, Artificial Sequence
  Synthetic oligonucleotide
gatggattgactagctacactacgtg

SEQ ID NO: 2878 - DNA, 25 bp, Artificial Sequence
  Synthetic oligonucleotide
gcaatgatggattgactagctacac

SEQ ID NO: 2879 - DNA, 27 bp, Artificial Sequence
  Synthetic oligonucleotide
gcaatgatggattgactagctacacta

SEQ ID NO: 2880 - DNA, 26 bp, Artificial Sequence
  Synthetic oligonucleotide
gcaatgatggattgactagctacact

SEQ ID NO: 2881 - DNA, 28 bp, Artificial Sequence
  Synthetic oligonucleotide
gcaatgatggattgactagctacactac

SEQ ID NO: 2882 - DNA, 25 bp, Artificial Sequence
  Synthetic oligonucleotide
ggcaatgatggattgactagctaca

SEQ ID NO: 2883 - DNA, 25 bp, Artificial Sequence
  Synthetic oligonucleotide
gtaggcaatgatggattgactagct

SEQ ID NO: 2884 - DNA, 27 bp, Artificial Sequence
  Synthetic oligonucleotide
acatagtgtaggcaatgatggattgac

SEQ ID NO: 2885 - DNA, 27 bp, Artificial Sequence
  Synthetic oligonucleotide
acatagtgtaggcaatgatggattgac

SEQ ID NO: 2886 - DNA, 27 bp, Artificial Sequence
  Synthetic oligonucleotide
catagtgtaggcaatgatggattgact

SEQ ID NO: 2887 - DNA, 27 bp, Artificial Sequence
  Synthetic oligonucleotide
catagtgtaggcaatgatggattgact

SEQ ID NO: 2888 - DNA, 27 bp, Artificial Sequence
  Synthetic oligonucleotide
gacatagtgtaggcaatgatggattga

SEQ ID NO: 2889 - DNA, 25 bp, Artificial Sequence
  Synthetic oligonucleotide
gcaatgatggattgactagctacac

SEQ ID NO: 2890 - DNA, 27 bp, Artificial Sequence
  Synthetic oligonucleotide
gcaatgatggattgactagctacacta

SEQ ID NO: 2891 - DNA, 26 bp, Artificial Sequence
  Synthetic oligonucleotide
gcaatgatggattgactagctacact

SEQ ID NO: 2892 - DNA, 25 bp, Artificial Sequence
  Synthetic oligonucleotide
ggcaatgatggattgactagctaca

SEQ ID NO: 2893 - DNA, 25 bp, Artificial Sequence
  Synthetic oligonucleotide
gtaggcaatgatggattgactagct

SEQ ID NO: 2894 - DNA, 27 bp, Artificial Sequence
  Synthetic oligonucleotide
tgacatagtgtaggcaatgatggattg

SEQ ID NO: 2895 - DNA, 26 bp, Artificial Sequence
  Synthetic oligonucleotide
tgatggattgactagctacactacgt

SEQ ID NO: 2896 - DNA, 27 bp, Artificial Sequence
  Synthetic oligonucleotide
gacatagtgtaggcaatgatggattga

SEQ ID NO: 2897 - DNA, 27 bp, Artificial Sequence
  Synthetic oligonucleotide
tgacatagtgtaggcaatgatggattg

SEQ ID NO: 2898 - DNA, 26 bp, Artificial Sequence
  Synthetic oligonucleotide
tgatggattgactagctacactacgt

SEQ ID NO: 2899 - DNA, 26 bp, Artificial Sequence
  Synthetic oligonucleotide
gatggattgactagctacactacgtg

SEQ ID NO: 2900 - DNA, 25 bp, Artificial Sequence
  Synthetic oligonucleotide
gcaatgatggattgactagctacac

SEQ ID NO: 2901 - DNA, 27 bp, Artificial Sequence
  Synthetic oligonucleotide
gcaatgatggattgactagctacacta

SEQ ID NO: 2902 - DNA, 26 bp, Artificial Sequence
  Synthetic oligonucleotide
gcaatgatggattgactagctacact

SEQ ID NO: 2903 - DNA, 28 bp, Artificial Sequence
  Synthetic oligonucleotide
gcaatgatggattgactagctacactac

SEQ ID NO: 2904 - DNA, 25 bp, Artificial Sequence
  Synthetic oligonucleotide
ggcaatgatggattgactagctaca

SEQ ID NO: 2905 - DNA, 25 bp, Artificial Sequence
  Synthetic oligonucleotide
gtaggcaatgatggattgactagct

SEQ ID NO: 2906 - DNA, 27 bp, Artificial Sequence
  Synthetic oligonucleotide
tgacatagtgtaggcaatgatggattg

SEQ ID NO: 2907 - DNA, 26 bp, Artificial Sequence
  Synthetic oligonucleotide
tgatggattgactagctacactacgt

SEQ ID NO: 2908 - DNA, 27 bp, Artificial Sequence
  Synthetic oligonucleotide
catagtgtaggcaatgatggattgact

SEQ ID NO: 2909 - DNA, 27 bp, Artificial Sequence
  Synthetic oligonucleotide
gacatagtgtaggcaatgatggattga

SEQ ID NO: 2910 - DNA, 27 bp, Artificial Sequence
  Synthetic oligonucleotide
tgacatagtgtaggcaatgatggattg

SEQ ID NO: 2911 - DNA, 26 bp, Artificial Sequence
  Synthetic oligonucleotide
tgatggattgactagctacactacgt

SEQ ID NO: 2912 - DNA, 26 bp, Artificial Sequence
  Synthetic oligonucleotide
gatggattgactagctacactacgtg

SEQ ID NO: 2913 - DNA, 25 bp, Artificial Sequence
  Synthetic oligonucleotide
gcaatgatggattgactagctacac

SEQ ID NO: 2914 - DNA, 27 bp, Artificial Sequence
  Synthetic oligonucleotide
gcaatgatggattgactagctacacta

SEQ ID NO: 2915 - DNA, 26 bp, Artificial Sequence
  Synthetic oligonucleotide
gcaatgatggattgactagctacact

SEQ ID NO: 2916 - DNA, 28 bp, Artificial Sequence
  Synthetic oligonucleotide
gcaatgatggattgactagctacactac

SEQ ID NO: 2917 - DNA, 25 bp, Artificial Sequence
  Synthetic oligonucleotide
ggcaatgatggattgactagctaca

SEQ ID NO: 2918 - DNA, 25 bp, Artificial Sequence
  Synthetic oligonucleotide
gtaggcaatgatggattgactagct

SEQ ID NO: 2919 - DNA, 27 bp, Artificial Sequence
  Synthetic oligonucleotide
tgacatagtgtaggcaatgatggattg

SEQ ID NO: 2920 - DNA, 26 bp, Artificial Sequence
  Synthetic oligonucleotide
tgatggattgactagctacactacgt

SEQ ID NO: 2921 - DNA, 27 bp, Artificial Sequence
  Synthetic oligonucleotide
acatagtgtaggcaatgatggattgac

SEQ ID NO: 2922 - DNA, 27 bp, Artificial Sequence
  Synthetic oligonucleotide
catagtgtaggcaatgatggattgact

SEQ ID NO: 2923 - DNA, 27 bp, Artificial Sequence
  Synthetic oligonucleotide
gacatagtgtaggcaatgatggattga

SEQ ID NO: 2924 - DNA, 26 bp, Artificial Sequence
  Synthetic oligonucleotide
gatggattgactagctacactacgtg

SEQ ID NO: 2925 - DNA, 25 bp, Artificial Sequence
  Synthetic oligonucleotide
gcaatgatggattgactagctacac

SEQ ID NO: 2926 - DNA, 27 bp, Artificial Sequence
  Synthetic oligonucleotide
gcaatgatggattgactagctacacta

SEQ ID NO: 2927 - DNA, 26 bp, Artificial Sequence
  Synthetic oligonucleotide
gcaatgatggattgactagctacact

SEQ ID NO: 2928 - DNA, 28 bp, Artificial Sequence
  Synthetic oligonucleotide
gcaatgatggattgactagctacactac

SEQ ID NO: 2929 - DNA, 25 bp, Artificial Sequence
  Synthetic oligonucleotide
ggcaatgatggattgactagctaca

SEQ ID NO: 2930 - DNA, 25 bp, Artificial Sequence
  Synthetic oligonucleotide
gtaggcaatgatggattgactagct

SEQ ID NO: 2931 - DNA, 27 bp, Artificial Sequence
  Synthetic oligonucleotide
tgacatagtgtaggcaatgatggattg

SEQ ID NO: 2932 - DNA, 26 bp, Artificial Sequence
  Synthetic oligonucleotide
tgatggattgactagctacactacgt

SEQ ID NO: 2933 - DNA, 27 bp, Artificial Sequence
  Synthetic oligonucleotide
acatagtgtaggcaatgatggattgac

SEQ ID NO: 2934 - DNA, 27 bp, Artificial Sequence
  Synthetic oligonucleotide
catagtgtaggcaatgatggattgact

SEQ ID NO: 2935 - DNA, 27 bp, Artificial Sequence
  Synthetic oligonucleotide
gacatagtgtaggcaatgatggattga

SEQ ID NO: 2936 - DNA, 26 bp, Artificial Sequence
  Synthetic oligonucleotide
gatggattgactagctacactacgtg

SEQ ID NO: 2937 - DNA, 25 bp, Artificial Sequence
  Synthetic oligonucleotide
gcaatgatggattgactagctacac

SEQ ID NO: 2938 - DNA, 27 bp, Artificial Sequence
  Synthetic oligonucleotide
gcaatgatggattgactagctacacta

SEQ ID NO: 2939 - DNA, 26 bp, Artificial Sequence
  Synthetic oligonucleotide
gcaatgatggattgactagctacact

SEQ ID NO: 2940 - DNA, 28 bp, Artificial Sequence
  Synthetic oligonucleotide
gcaatgatggattgactagctacactac

SEQ ID NO: 2941 - DNA, 25 bp, Artificial Sequence
  Synthetic oligonucleotide
ggcaatgatggattgactagctaca

SEQ ID NO: 2942 - DNA, 25 bp, Artificial Sequence
  Synthetic oligonucleotide
gtaggcaatgatggattgactagct

SEQ ID NO: 2943 - DNA, 27 bp, Artificial Sequence
  Synthetic oligonucleotide
tgacatagtgtaggcaatgatggattg

SEQ ID NO: 2944 - DNA, 26 bp, Artificial Sequence
  Synthetic oligonucleotide
tgatggattgactagctacactacgt

SEQ ID NO: 2945 - DNA, 27 bp, Artificial Sequence
  Synthetic oligonucleotide
acatagtgtaggcaatgatggattgac

SEQ ID NO: 2946 - DNA, 27 bp, Artificial Sequence
  Synthetic oligonucleotide
acatagtgtaggcaatgatggattgac

SEQ ID NO: 2947 - DNA, 27 bp, Artificial Sequence
  Synthetic oligonucleotide
gacatagtgtaggcaatgatggattga

SEQ ID NO: 2948 - DNA, 25 bp, Artificial Sequence
  Synthetic oligonucleotide
gcaatgatggattgactagctacac

SEQ ID NO: 2949 - DNA, 27 bp, Artificial Sequence
  Synthetic oligonucleotide
gcaatgatggattgactagctacacta

SEQ ID NO: 2950 - DNA, 26 bp, Artificial Sequence
  Synthetic oligonucleotide
gcaatgatggattgactagctacact

SEQ ID NO: 2951 - DNA, 25 bp, Artificial Sequence
  Synthetic oligonucleotide
ggcaatgatggattgactagctaca

SEQ ID NO: 2952 - DNA, 27 bp, Artificial Sequence
  Synthetic oligonucleotide
tgacatagtgtaggcaatgatggattg

SEQ ID NO: 2953 - DNA, 26 bp, Artificial Sequence
  Synthetic oligonucleotide
tgatggattgactagctacactacgt

SEQ ID NO: 2954 - DNA, 27 bp, Artificial Sequence
  Synthetic oligonucleotide
catagtgtaggcaatgatggattgact

SEQ ID NO: 2955 - DNA, 27 bp, Artificial Sequence
  Synthetic oligonucleotide
gacatagtgtaggcaatgatggattga

SEQ ID NO: 2956 - DNA, 26 bp, Artificial Sequence
  Synthetic oligonucleotide
gatggattgactagctacactacgtg

SEQ ID NO: 2957 - DNA, 25 bp, Artificial Sequence
  Synthetic oligonucleotide
gcaatgatggattgactagctacac

SEQ ID NO: 2958 - DNA, 27 bp, Artificial Sequence
  Synthetic oligonucleotide
gcaatgatggattgactagctacacta

SEQ ID NO: 2959 - DNA, 26 bp, Artificial Sequence
  Synthetic oligonucleotide
gcaatgatggattgactagctacact

SEQ ID NO: 2960 - DNA, 28 bp, Artificial Sequence
  Synthetic oligonucleotide
gcaatgatggattgactagctacactac

SEQ ID NO: 2961 - DNA, 25 bp, Artificial Sequence
  Synthetic oligonucleotide
ggcaatgatggattgactagctaca

SEQ ID NO: 2962 - DNA, 25 bp, Artificial Sequence
  Synthetic oligonucleotide
gtaggcaatgatggattgactagct

SEQ ID NO: 2963 - DNA, 27 bp, Artificial Sequence
  Synthetic oligonucleotide
tgacatagtgtaggcaatgatggattg

SEQ ID NO: 2964 - DNA, 26 bp, Artificial Sequence
  Synthetic oligonucleotide
tgatggattgactagctacactacgt

SEQ ID NO: 2965 - DNA, 25 bp, Artificial Sequence
  Synthetic oligonucleotide
gcaatgatggattgactagctacac

SEQ ID NO: 2966 - DNA, 25 bp, Artificial Sequence
  Synthetic oligonucleotide
ggcaatgatggattgactagctaca

SEQ ID NO: 2967 - DNA, 26 bp, Artificial Sequence
  Synthetic oligonucleotide
tgatggattgactagctacactacgt

SEQ ID NO: 2968 - DNA, 26 bp, Artificial Sequence
  Synthetic oligonucleotide
tgatggattgactagctacactacgt

SEQ ID NO: 2969 - DNA, 21 bp, Artificial Sequence
  Synthetic oligonucleotide
ggcaggagcagttgtgaagtt

SEQ ID NO: 2970 - DNA, 21 bp, Artificial Sequence
  Synthetic oligonucleotide
ggcaggagcagttgtgaagtt

SEQ ID NO: 2971 - DNA, 21 bp, Artificial Sequence
  Synthetic oligonucleotide
ggcaggagcagttgtgaagtt

SEQ ID NO: 2972 - DNA, 22 bp, Artificial Sequence
  Synthetic oligonucleotide
tatggttggtaaccaacaccat

SEQ ID NO: 2973 - DNA, 27 bp, Artificial Sequence
  Synthetic oligonucleotide
aagttcaaaagaaagtactactactct

SEQ ID NO: 2974 - DNA, 27 bp, Artificial Sequence
  Synthetic oligonucleotide
aagttcaaaagaaagtactactactct

SEQ ID NO: 2975 - DNA, 22 bp, Artificial Sequence
  Synthetic oligonucleotide
tatggttggtaaccaacaccat

SEQ ID NO: 2976 - DNA, 27 bp, Artificial Sequence
  Synthetic oligonucleotide
gtactactactctgtatggttggtaac

SEQ ID NO: 2977 - DNA, 27 bp, Artificial Sequence
  Synthetic oligonucleotide
caaaaggtttgagattagacttcctaa

SEQ ID NO: 2978 - DNA, 27 bp, Artificial Sequence
  Synthetic oligonucleotide
caattaaaaccttcaacaccattacaa

SEQ ID NO: 2979 - DNA, 31 bp, Artificial Sequence; identical to SEQ ID NO: 2328
  Synthetic oligonucleotide

SEQ ID NO: 2980 - DNA, 25 bp, Artificial Sequence
  Synthetic oligonucleotide
gcatggaaccaagtaacattggaaa

SEQ ID NO: 2981 - DNA, 24 bp, Artificial Sequence
  Synthetic oligonucleotide
gcatgaatagcaacagggacttct

SEQ ID NO: 2982 - DNA, 26 bp, Artificial Sequence
  Synthetic oligonucleotide
tgatggattgactagctacactacgt

SEQ ID NO: 2983 - DNA, 26 bp, Artificial Sequence
  Synthetic oligonucleotide
tgatggattgactagctacactacgt

SEQ ID NO: 2984 - DNA, 26 bp, Artificial Sequence
  Synthetic oligonucleotide
tgatggattgactagctacactacgt

SEQ ID NO: 2985 - DNA, 26 bp, Artificial Sequence
  Synthetic oligonucleotide
tgatggattgactagctacactacgt

SEQ ID NO: 2986 - DNA, 25 bp, Artificial Sequence
  Synthetic oligonucleotide
gtgacatagtgtaggcaatgatgga

SEQ ID NO: 2987 - DNA, 25 bp, Artificial Sequence
  Synthetic oligonucleotide
gtgacatagtgtaggcaatgatgga

SEQ ID NO: 2988 - DNA, 25 bp, Artificial Sequence
  Synthetic oligonucleotide
gcaccaaaattggagctaagttgtt

SEQ ID NO: 2989 - DNA, 24 bp, Artificial Sequence
  Synthetic oligonucleotide
gcaccaaaattggagctaagttgt

SEQ ID NO: 2990 - DNA, 33 bp, Artificial Sequence
  Synthetic oligonucleotide
ggcgtgtgcttagaatatattttaaaataacca

SEQ ID NO: 2991 - DNA, 33 bp, Artificial Sequence; identical to SEQ ID NO: 2990
  Synthetic oligonucleotide

SEQ ID NO: 2992 - DNA, 25 bp, Artificial Sequence
  Synthetic oligonucleotide
ctgaagaagaatcaccaggagtcaa

SEQ ID NO: 2993 - DNA, 24 bp, Artificial Sequence
  Synthetic oligonucleotide
agctgtccaacctgaagaagaatc

SEQ ID NO: 2994 - DNA, 23 bp, Artificial Sequence
  Synthetic oligonucleotide
cagctgtccaacctgaagaagaa

SEQ ID NO: 2995 - DNA, 22 bp, Artificial Sequence
  Synthetic oligonucleotide
cagctgtccaacctgaagaaga

SEQ ID NO: 2996 - DNA, 24 bp, Artificial Sequence
  Synthetic oligonucleotide
cagctgtccaacctgaagaagaat

SEQ ID NO: 2997 - DNA, 21 bp, Artificial Sequence
  Synthetic oligonucleotide
ccagctgtccaacctgaagaa

SEQ ID NO: 2998 - DNA, 22 bp, Artificial Sequence
  Synthetic oligonucleotide
ccagctgtccaacctgaagaag

SEQ ID NO: 2999 - DNA, 26 bp, Artificial Sequence
  Synthetic oligonucleotide
ctgaagaagaatcaccaggagtcaaa

SEQ ID NO: 3000 - DNA, 25 bp, Artificial Sequence
  Synthetic oligonucleotide
ctgaagaagaatcaccaggagtcaa

SEQ ID NO: 3001 - DNA, 24 bp, Artificial Sequence
  Synthetic oligonucleotide
ctgaagaagaatcaccaggagtca

SEQ ID NO: 3002 - DNA, 24 bp, Artificial Sequence
  Synthetic oligonucleotide
gctgtccaacctgaagaagaatca

SEQ ID NO: 3003 - DNA, 25 bp, Artificial Sequence
  Synthetic oligonucleotide
gctgtccaacctgaagaagaatcac

SEQ ID NO: 3004 - DNA, 24 bp, Artificial Sequence
  Synthetic oligonucleotide
agctgtccaacctgaagaagaatc

SEQ ID NO: 3005 - DNA, 23 bp, Artificial Sequence
  Synthetic oligonucleotide
cagctgtccaacctgaagaagaa

SEQ ID NO: 3006 - DNA, 22 bp, Artificial Sequence
  Synthetic oligonucleotide
cagctgtccaacctgaagaaga

SEQ ID NO: 3007 - DNA, 24 bp, Artificial Sequence
  Synthetic oligonucleotide
cagctgtccaacctgaagaagaat

SEQ ID NO: 3008 - DNA, 21 bp, Artificial Sequence
  Synthetic oligonucleotide
ccagctgtccaacctgaagaa

SEQ ID NO: 3009 - DNA, 22 bp, Artificial Sequence
  Synthetic oligonucleotide
ccagctgtccaacctgaagaag

SEQ ID NO: 3010 - DNA, 26 bp, Artificial Sequence
  Synthetic oligonucleotide
ctgaagaagaatcaccaggagtcaaa

SEQ ID NO: 3011 - DNA, 25 bp, Artificial Sequence
  Synthetic oligonucleotide
ctgaagaagaatcaccaggagtcaa

SEQ ID NO: 3012 - DNA, 24 bp, Artificial Sequence
  Synthetic oligonucleotide
ctgaagaagaatcaccaggagtca

SEQ ID NO: 3013 - DNA, 24 bp, Artificial Sequence
  Synthetic oligonucleotide
gctgtccaacctgaagaagaatca

SEQ ID NO: 3014 - DNA, 25 bp, Artificial Sequence
  Synthetic oligonucleotide
gctgtccaacctgaagaagaatcac

SEQ ID NO: 3015 - DNA, 24 bp, Artificial Sequence
  Synthetic oligonucleotide
agctgtccaacctgaagaagaatc

SEQ ID NO: 3016 - DNA, 23 bp, Artificial Sequence
  Synthetic oligonucleotide
cagctgtccaacctgaagaagaa

SEQ ID NO: 3017 - DNA, 22 bp, Artificial Sequence
  Synthetic oligonucleotide
cagctgtccaacctgaagaaga

SEQ ID NO: 3018 - DNA, 24 bp, Artificial Sequence
  Synthetic oligonucleotide
cagctgtccaacctgaagaagaat

SEQ ID NO: 3019 - DNA, 21 bp, Artificial Sequence
  Synthetic oligonucleotide
ccagctgtccaacctgaagaa

SEQ ID NO: 3020 - DNA, 22 bp, Artificial Sequence
  Synthetic oligonucleotide
ccagctgtccaacctgaagaag

SEQ ID NO: 3021 - DNA, 26 bp, Artificial Sequence
  Synthetic oligonucleotide
ctgaagaagaatcaccaggagtcaaa

SEQ ID NO: 3022 - DNA, 25 bp, Artificial Sequence
  Synthetic oligonucleotide
ctgaagaagaatcaccaggagtcaa

SEQ ID NO: 3023 - DNA, 27 bp, Artificial Sequence
  Synthetic oligonucleotide
ctgaagaagaatcaccaggagtcaaat

SEQ ID NO: 3024 - DNA, 24 bp, Artificial Sequence
  Synthetic oligonucleotide
ctgaagaagaatcaccaggagtca

SEQ ID NO: 3025 - DNA, 24 bp, Artificial Sequence
  Synthetic oligonucleotide
gctgtccaacctgaagaagaatca

SEQ ID NO: 3026 - DNA, 25 bp, Artificial Sequence
  Synthetic oligonucleotide
gctgtccaacctgaagaagaatcac

SEQ ID NO: 3027 - DNA, 24 bp, Artificial Sequence
  Synthetic oligonucleotide
agctgtccaacctgaagaagaatc

SEQ ID NO: 3028 - DNA, 23 bp, Artificial Sequence
  Synthetic oligonucleotide
cagctgtccaacctgaagaagaa

SEQ ID NO: 3029 - DNA, 22 bp, Artificial Sequence
  Synthetic oligonucleotide
cagctgtccaacctgaagaaga

SEQ ID NO: 3030 - DNA, 24 bp, Artificial Sequence
  Synthetic oligonucleotide
cagctgtccaacctgaagaagaat

SEQ ID NO: 3031 - DNA, 21 bp, Artificial Sequence
  Synthetic oligonucleotide
ccagctgtccaacctgaagaa

SEQ ID NO: 3032 - DNA, 22 bp, Artificial Sequence
  Synthetic oligonucleotide
ccagctgtccaacctgaagaag

SEQ ID NO: 3033 - DNA, 26 bp, Artificial Sequence
  Synthetic oligonucleotide
ctgaagaagaatcaccaggagtcaaa

SEQ ID NO: 3034 - DNA, 25 bp, Artificial Sequence
  Synthetic oligonucleotide
ctgaagaagaatcaccaggagtcaa

SEQ ID NO: 3035 - DNA, 27 bp, Artificial Sequence
  Synthetic oligonucleotide
ctgaagaagaatcaccaggagtcaaat

SEQ ID NO: 3036 - DNA, 24 bp, Artificial Sequence
  Synthetic oligonucleotide
ctgaagaagaatcaccaggagtca

SEQ ID NO: 3037 - DNA, 24 bp, Artificial Sequence
  Synthetic oligonucleotide
gctgtccaacctgaagaagaatca

SEQ ID NO: 3038 - DNA, 25 bp, Artificial Sequence
  Synthetic oligonucleotide
gctgtccaacctgaagaagaatcac

SEQ ID NO: 3039 - DNA, 24 bp, Artificial Sequence
  Synthetic oligonucleotide
agctgtccaacctgaagaagaatc

SEQ ID NO: 3040 - DNA, 23 bp, Artificial Sequence
  Synthetic oligonucleotide
cagctgtccaacctgaagaagaa

SEQ ID NO: 3041 - DNA, 22 bp, Artificial Sequence
  Synthetic oligonucleotide
cagctgtccaacctgaagaaga

SEQ ID NO: 3042 - DNA, 24 bp, Artificial Sequence
  Synthetic oligonucleotide
cagctgtccaacctgaagaagaat

SEQ ID NO: 3043 - DNA, 21 bp, Artificial Sequence
  Synthetic oligonucleotide
ccagctgtccaacctgaagaa

SEQ ID NO: 3044 - DNA, 22 bp, Artificial Sequence
  Synthetic oligonucleotide
ccagctgtccaacctgaagaag

SEQ ID NO: 3045 - DNA, 26 bp, Artificial Sequence
  Synthetic oligonucleotide
ctgaagaagaatcaccaggagtcaaa

SEQ ID NO: 3046 - DNA, 25 bp, Artificial Sequence
  Synthetic oligonucleotide
ctgaagaagaatcaccaggagtcaa

SEQ ID NO: 3047 - DNA, 24 bp, Artificial Sequence
  Synthetic oligonucleotide
ctgaagaagaatcaccaggagtca

SEQ ID NO: 3048 - DNA, 24 bp, Artificial Sequence
  Synthetic oligonucleotide
gctgtccaacctgaagaagaatca

SEQ ID NO: 3049 - DNA, 25 bp, Artificial Sequence
  Synthetic oligonucleotide
gctgtccaacctgaagaagaatcac

SEQ ID NO: 3050 - DNA, 25 bp, Artificial Sequence
  Synthetic oligonucleotide
ctgattctcttcctgttccaagcat

SEQ ID NO: 3051 - DNA, 25 bp, Artificial Sequence
  Synthetic oligonucleotide
ctgattctcttcctgttccaagcat

SEQ ID NO: 3052 - DNA, 26 bp, Artificial Sequence
  Synthetic oligonucleotide
cacgtgtgaaagaattagtgtatgca

SEQ ID NO: 3053 - DNA, 31 bp, Artificial Sequence
  Synthetic oligonucleotide
gcagagatcatttaatttagtaggagacact

SEQ ID NO: 3054 - DNA, 31 bp, Artificial Sequence; identical to SEQ ID NO: 2328
  Synthetic oligonucleotide

SEQ ID NO: 3055 - DNA, 29 bp, Artificial Sequence
  Synthetic oligonucleotide
aacaattaaaaccttcaacaccattacaa

SEQ ID NO: 3056 - DNA, 22 bp, Artificial Sequence
  Synthetic oligonucleotide
atgaatagcaacagggacttct

SEQ ID NO: 3057 - DNA, 24 bp, Artificial Sequence
  Synthetic oligonucleotide
gcatgaatagcaacagggacttct

SEQ ID NO: 3058 - DNA, 27 bp, Artificial Sequence
  Synthetic oligonucleotide
caaaaggtttgagattagacttcctaa

SEQ ID NO: 3059 - DNA, 32 bp, Artificial Sequence; identical to SEQ ID NO: 2412
  Synthetic oligonucleotide

SEQ ID NO: 3060 - DNA, 31 bp, Artificial Sequence; identical to SEQ ID NO: 2328
  Synthetic oligonucleotide

SEQ ID NO: 3061 - DNA, 29 bp, Artificial Sequence
  Synthetic oligonucleotide
aacaattaaaaccttcaacaccattacaa

SEQ ID NO: 3062 - DNA, 29 bp, Artificial Sequence
  Synthetic oligonucleotide
agtactactactctgtatggttggtaacc

SEQ ID NO: 3063 - DNA, 22 bp, Artificial Sequence
  Synthetic oligonucleotide
tgcacttcagcctcaactttgt

SEQ ID NO: 3064 - DNA, 24 bp, Artificial Sequence
  Synthetic oligonucleotide
atttgcacttcagcctcaactttg

SEQ ID NO: 3065 - DNA, 23 bp, Artificial Sequence
  Synthetic oligonucleotide
caatttgcacttcagcctcaact

SEQ ID NO: 3066 - DNA, 24 bp, Artificial Sequence
  Synthetic oligonucleotide
caatttgcacttcagcctcaactt

SEQ ID NO: 3067 - DNA, 25 bp, Artificial Sequence
  Synthetic oligonucleotide
caatttgcacttcagcctcaacttt

SEQ ID NO: 3068 - DNA, 25 bp, Artificial Sequence
  Synthetic oligonucleotide
ctatcaatttgcacttcagcctcaa

SEQ ID NO: 3069 - DNA, 26 bp, Artificial Sequence
  Synthetic oligonucleotide
ctatcaatttgcacttcagcctcaac

SEQ ID NO: 3070 - DNA, 22 bp, Artificial Sequence
  Synthetic oligonucleotide
gcacttcagcctcaactttgtc

SEQ ID NO: 3071 - DNA, 22 bp, Artificial Sequence
  Synthetic oligonucleotide
tgcacttcagcctcaactttgt

SEQ ID NO: 3072 - DNA, 24 bp, Artificial Sequence
  Synthetic oligonucleotide
acctatcaatttgcacttcagcct

SEQ ID NO: 3073 - DNA, 23 bp, Artificial Sequence
  Synthetic oligonucleotide
caatttgcacttcagcctcaact

SEQ ID NO: 3074 - DNA, 24 bp, Artificial Sequence
  Synthetic oligonucleotide
caatttgcacttcagcctcaactt

SEQ ID NO: 3075 - DNA, 25 bp, Artificial Sequence
  Synthetic oligonucleotide
caatttgcacttcagcctcaacttt

SEQ ID NO: 3076 - DNA, 25 bp, Artificial Sequence
  Synthetic oligonucleotide
cctatcaatttgcacttcagcctca

SEQ ID NO: 3077 - DNA, 25 bp, Artificial Sequence
  Synthetic oligonucleotide
cctgtgatcaacctatcaatttgca

SEQ ID NO: 3078 - DNA, 25 bp, Artificial Sequence
  Synthetic oligonucleotide
ctatcaatttgcacttcagcctcaa

SEQ ID NO: 3079 - DNA, 26 bp, Artificial Sequence
  Synthetic oligonucleotide
ctatcaatttgcacttcagcctcaac

SEQ ID NO: 3080 - DNA, 22 bp, Artificial Sequence
  Synthetic oligonucleotide
gcacttcagcctcaactttgtc

SEQ ID NO: 3081 - DNA, 22 bp, Artificial Sequence
  Synthetic oligonucleotide
tgcacttcagcctcaactttgt

SEQ ID NO: 3082 - DNA, 24 bp, Artificial Sequence
  Synthetic oligonucleotide
acctatcaatttgcacttcagcct

SEQ ID NO: 3083 - DNA, 24 bp, Artificial Sequence
  Synthetic oligonucleotide
atttgcacttcagcctcaactttg

SEQ ID NO: 3084 - DNA, 23 bp, Artificial Sequence
  Synthetic oligonucleotide
caatttgcacttcagcctcaact

SEQ ID NO: 3085 - DNA, 24 bp, Artificial Sequence
  Synthetic oligonucleotide
caatttgcacttcagcctcaactt

SEQ ID NO: 3086 - DNA, 25 bp, Artificial Sequence
  Synthetic oligonucleotide
caatttgcacttcagcctcaacttt

SEQ ID NO: 3087 - DNA, 25 bp, Artificial Sequence
  Synthetic oligonucleotide
cctatcaatttgcacttcagcctca

SEQ ID NO: 3088 - DNA, 25 bp, Artificial Sequence
  Synthetic oligonucleotide
ctatcaatttgcacttcagcctcaa

SEQ ID NO: 3089 - DNA, 26 bp, Artificial Sequence
  Synthetic oligonucleotide
ctatcaatttgcacttcagcctcaac

SEQ ID NO: 3090 - DNA, 27 bp, Artificial Sequence
  Synthetic oligonucleotide
ctgtgatcaacctatcaatttgcactt

SEQ ID NO: 3091 - DNA, 22 bp, Artificial Sequence
  Synthetic oligonucleotide
gcacttcagcctcaactttgtc

SEQ ID NO: 3092 - DNA, 24 bp, Artificial Sequence
  Synthetic oligonucleotide
atttgcacttcagcctcaactttg

SEQ ID NO: 3093 - DNA, 23 bp, Artificial Sequence
  Synthetic oligonucleotide
caatttgcacttcagcctcaact

SEQ ID NO: 3094 - DNA, 24 bp, Artificial Sequence
  Synthetic oligonucleotide
caatttgcacttcagcctcaactt

SEQ ID NO: 3095 - DNA, 25 bp, Artificial Sequence
  Synthetic oligonucleotide
caatttgcacttcagcctcaacttt

SEQ ID NO: 3096 - DNA, 25 bp, Artificial Sequence
  Synthetic oligonucleotide
ctatcaatttgcacttcagcctcaa

SEQ ID NO: 3097 - DNA, 26 bp, Artificial Sequence
  Synthetic oligonucleotide
ctatcaatttgcacttcagcctcaac

SEQ ID NO: 3098 - DNA, 22 bp, Artificial Sequence
  Synthetic oligonucleotide
tgcacttcagcctcaactttgt

SEQ ID NO: 3099 - DNA, 22 bp, Artificial Sequence
  Synthetic oligonucleotide
gcacttcagcctcaactttgtc

SEQ ID NO: 3100 - DNA, 22 bp, Artificial Sequence
  Synthetic oligonucleotide
tgcacttcagcctcaactttgt

SEQ ID NO: 3101 - DNA, 24 bp, Artificial Sequence
  Synthetic oligonucleotide
atttgcacttcagcctcaactttg

SEQ ID NO: 3102 - DNA, 23 bp, Artificial Sequence
  Synthetic oligonucleotide
caatttgcacttcagcctcaact

SEQ ID NO: 3103 - DNA, 24 bp, Artificial Sequence
  Synthetic oligonucleotide
caatttgcacttcagcctcaactt

SEQ ID NO: 3104 - DNA, 25 bp, Artificial Sequence
  Synthetic oligonucleotide
caatttgcacttcagcctcaacttt

SEQ ID NO: 3105 - DNA, 25 bp, Artificial Sequence
  Synthetic oligonucleotide
ctatcaatttgcacttcagcctcaa

SEQ ID NO: 3106 - DNA, 26 bp, Artificial Sequence
  Synthetic oligonucleotide
ctatcaatttgcacttcagcctcaac

SEQ ID NO: 3107 - DNA, 22 bp, Artificial Sequence
  Synthetic oligonucleotide
gcacttcagcctcaactttgtc

SEQ ID NO: 3108 - DNA, 22 bp, Artificial Sequence
  Synthetic oligonucleotide
tgcacttcagcctcaactttgt

SEQ ID NO: 3109 - DNA, 24 bp, Artificial Sequence
  Synthetic oligonucleotide
atttgcacttcagcctcaactttg

SEQ ID NO: 3110 - DNA, 23 bp, Artificial Sequence
  Synthetic oligonucleotide
caatttgcacttcagcctcaact

SEQ ID NO: 3111 - DNA, 24 bp, Artificial Sequence
  Synthetic oligonucleotide
caatttgcacttcagcctcaactt

SEQ ID NO: 3112 - DNA, 25 bp, Artificial Sequence
  Synthetic oligonucleotide
caatttgcacttcagcctcaacttt

SEQ ID NO: 3113 - DNA, 25 bp, Artificial Sequence
  Synthetic oligonucleotide
cctgtgatcaacctatcaatttgca

SEQ ID NO: 3114 - DNA, 25 bp, Artificial Sequence
  Synthetic oligonucleotide
ctatcaatttgcacttcagcctcaa

SEQ ID NO: 3115 - DNA, 26 bp, Artificial Sequence
  Synthetic oligonucleotide
ctatcaatttgcacttcagcctcaac

SEQ ID NO: 3116 - DNA, 22 bp, Artificial Sequence
  Synthetic oligonucleotide
gcacttcagcctcaactttgtc

SEQ ID NO: 3117 - DNA, 24 bp, Artificial Sequence
  Synthetic oligonucleotide
atttgcacttcagcctcaactttg

SEQ ID NO: 3118 - DNA, 23 bp, Artificial Sequence
  Synthetic oligonucleotide
caatttgcacttcagcctcaact

SEQ ID NO: 3119 - DNA, 24 bp, Artificial Sequence
  Synthetic oligonucleotide
caatttgcacttcagcctcaactt

SEQ ID NO: 3120 - DNA, 25 bp, Artificial Sequence
  Synthetic oligonucleotide
caatttgcacttcagcctcaacttt

SEQ ID NO: 3121 - DNA, 25 bp, Artificial Sequence
  Synthetic oligonucleotide
ctatcaatttgcacttcagcctcaa

SEQ ID NO: 3122 - DNA, 22 bp, Artificial Sequence
  Synthetic oligonucleotide
gcacttcagcctcaactttgtc

SEQ ID NO: 3123 - DNA, 22 bp, Artificial Sequence
  Synthetic oligonucleotide
tgcacttcagcctcaactttgt

SEQ ID NO: 3124 - DNA, 24 bp, Artificial Sequence
  Synthetic oligonucleotide
atttgcacttcagcctcaactttg

SEQ ID NO: 3125 - DNA, 23 bp, Artificial Sequence
  Synthetic oligonucleotide
caatttgcacttcagcctcaact

SEQ ID NO: 3126 - DNA, 24 bp, Artificial Sequence
  Synthetic oligonucleotide
caatttgcacttcagcctcaactt

SEQ ID NO: 3127 - DNA, 25 bp, Artificial Sequence
  Synthetic oligonucleotide
caatttgcacttcagcctcaacttt

SEQ ID NO: 3128 - DNA, 25 bp, Artificial Sequence
  Synthetic oligonucleotide
ctatcaatttgcacttcagcctcaa

SEQ ID NO: 3129 - DNA, 26 bp, Artificial Sequence
  Synthetic oligonucleotide
ctatcaatttgcacttcagcctcaac

SEQ ID NO: 3130 - DNA, 22 bp, Artificial Sequence
  Synthetic oligonucleotide
gcacttcagcctcaactttgtc

SEQ ID NO: 3131 - DNA, 22 bp, Artificial Sequence
  Synthetic oligonucleotide
tgcacttcagcctcaactttgt

SEQ ID NO: 3132 - DNA, 24 bp, Artificial Sequence
  Synthetic oligonucleotide
atttgcacttcagcctcaactttg

SEQ ID NO: 3133 - DNA, 23 bp, Artificial Sequence
  Synthetic oligonucleotide
caatttgcacttcagcctcaact

SEQ ID NO: 3134 - DNA, 24 bp, Artificial Sequence
  Synthetic oligonucleotide
caatttgcacttcagcctcaactt

SEQ ID NO: 3135 - DNA, 25 bp, Artificial Sequence
  Synthetic oligonucleotide
caatttgcacttcagcctcaacttt

SEQ ID NO: 3136 - DNA, 25 bp, Artificial Sequence
  Synthetic oligonucleotide
ctatcaatttgcacttcagcctcaa

SEQ ID NO: 3137 - DNA, 26 bp, Artificial Sequence
  Synthetic oligonucleotide
ctatcaatttgcacttcagcctcaac

SEQ ID NO: 3138 - DNA, 22 bp, Artificial Sequence
  Synthetic oligonucleotide
tgcacttcagcctcaactttgt

SEQ ID NO: 3139 - DNA, 22 bp, Artificial Sequence
  Synthetic oligonucleotide
gcacttcagcctcaactttgtc

SEQ ID NO: 3140 - DNA, 22 bp, Artificial Sequence
  Synthetic oligonucleotide
tgcacttcagcctcaactttgt

SEQ ID NO: 3141 - DNA, 24 bp, Artificial Sequence
  Synthetic oligonucleotide
atttgcacttcagcctcaactttg

SEQ ID NO: 3142 - DNA, 23 bp, Artificial Sequence
  Synthetic oligonucleotide
caatttgcacttcagcctcaact

SEQ ID NO: 3143 - DNA, 24 bp, Artificial Sequence
  Synthetic oligonucleotide
caatttgcacttcagcctcaactt

SEQ ID NO: 3144 - DNA, 25 bp, Artificial Sequence
  Synthetic oligonucleotide
caatttgcacttcagcctcaacttt

SEQ ID NO: 3145 - DNA, 25 bp, Artificial Sequence
  Synthetic oligonucleotide
ctatcaatttgcacttcagcctcaa

SEQ ID NO: 3146 - DNA, 26 bp, Artificial Sequence
  Synthetic oligonucleotide
ctatcaatttgcacttcagcctcaac

SEQ ID NO: 3147 - DNA, 22 bp, Artificial Sequence
  Synthetic oligonucleotide
gcacttcagcctcaactttgtc

SEQ ID NO: 3148 - DNA, 22 bp, Artificial Sequence
  Synthetic oligonucleotide
tgcacttcagcctcaactttgt

SEQ ID NO: 3149 - DNA, 24 bp, Artificial Sequence
  Synthetic oligonucleotide
atttgcacttcagcctcaactttg

SEQ ID NO: 3150 - DNA, 23 bp, Artificial Sequence
  Synthetic oligonucleotide
caatttgcacttcagcctcaact

SEQ ID NO: 3151 - DNA, 24 bp, Artificial Sequence
  Synthetic oligonucleotide
caatttgcacttcagcctcaactt

SEQ ID NO: 3152 - DNA, 25 bp, Artificial Sequence
  Synthetic oligonucleotide
caatttgcacttcagcctcaacttt

SEQ ID NO: 3153 - DNA, 25 bp, Artificial Sequence
  Synthetic oligonucleotide
ctatcaatttgcacttcagcctcaa

SEQ ID NO: 3154 - DNA, 26 bp, Artificial Sequence
  Synthetic oligonucleotide
ctatcaatttgcacttcagcctcaac

SEQ ID NO: 3155 - DNA, 22 bp, Artificial Sequence
  Synthetic oligonucleotide
gcacttcagcctcaactttgtc

SEQ ID NO: 3156 - DNA, 22 bp, Artificial Sequence
  Synthetic oligonucleotide
tgcacttcagcctcaactttgt

SEQ ID NO: 3157 - DNA, 24 bp, Artificial Sequence
  Synthetic oligonucleotide
atttgcacttcagcctcaactttg

SEQ ID NO: 3158 - DNA, 23 bp, Artificial Sequence
  Synthetic oligonucleotide
caatttgcacttcagcctcaact

SEQ ID NO: 3159 - DNA, 24 bp, Artificial Sequence
  Synthetic oligonucleotide
caatttgcacttcagcctcaactt

SEQ ID NO: 3160 - DNA, 25 bp, Artificial Sequence
  Synthetic oligonucleotide
caatttgcacttcagcctcaacttt

SEQ ID NO: 3161 - DNA, 25 bp, Artificial Sequence
  Synthetic oligonucleotide
cctgtgatcaacctatcaatttgca

SEQ ID NO: 3162 - DNA, 25 bp, Artificial Sequence
  Synthetic oligonucleotide
ctatcaatttgcacttcagcctcaa

SEQ ID NO: 3163 - DNA, 26 bp, Artificial Sequence
  Synthetic oligonucleotide
ctatcaatttgcacttcagcctcaac

SEQ ID NO: 3164 - DNA, 22 bp, Artificial Sequence
  Synthetic oligonucleotide
gcacttcagcctcaactttgtc

SEQ ID NO: 3165 - DNA, 24 bp, Artificial Sequence
  Synthetic oligonucleotide
atttgcacttcagcctcaactttg

SEQ ID NO: 3166 - DNA, 25 bp, Artificial Sequence
  Synthetic oligonucleotide
caatttgcacttcagcctcaacttt

SEQ ID NO: 3167 - DNA, 25 bp, Artificial Sequence
  Synthetic oligonucleotide
ctatcaatttgcacttcagcctcaa

SEQ ID NO: 3168 - DNA, 26 bp, Artificial Sequence
  Synthetic oligonucleotide
ctatcaatttgcacttcagcctcaac

SEQ ID NO: 3169 - DNA, 22 bp, Artificial Sequence
  Synthetic oligonucleotide
tgcacttcagcctcaactttgt

SEQ ID NO: 3170 - DNA, 22 bp, Artificial Sequence
  Synthetic oligonucleotide
gcacttcagcctcaactttgtc

SEQ ID NO: 3171 - DNA, 22 bp, Artificial Sequence
  Synthetic oligonucleotide
tgcacttcagcctcaactttgt

SEQ ID NO: 3172 - DNA, 24 bp, Artificial Sequence
  Synthetic oligonucleotide
atttgcacttcagcctcaactttg

SEQ ID NO: 3173 - DNA, 23 bp, Artificial Sequence
  Synthetic oligonucleotide
caatttgcacttcagcctcaact

SEQ ID NO: 3174 - DNA, 24 bp, Artificial Sequence
  Synthetic oligonucleotide
caatttgcacttcagcctcaactt

SEQ ID NO: 3175 - DNA, 25 bp, Artificial Sequence
  Synthetic oligonucleotide
caatttgcacttcagcctcaacttt

SEQ ID NO: 3176 - DNA, 25 bp, Artificial Sequence
  Synthetic oligonucleotide
ctatcaatttgcacttcagcctcaa

SEQ ID NO: 3177 - DNA, 26 bp, Artificial Sequence
  Synthetic oligonucleotide
ctatcaatttgcacttcagcctcaac

SEQ ID NO: 3178 - DNA, 22 bp, Artificial Sequence
  Synthetic oligonucleotide
gcacttcagcctcaactttgtc

SEQ ID NO: 3179 - DNA, 24 bp, Artificial Sequence
  Synthetic oligonucleotide
atttgcacttcagcctcaactttg

SEQ ID NO: 3180 - DNA, 23 bp, Artificial Sequence
  Synthetic oligonucleotide
caatttgcacttcagcctcaact

SEQ ID NO: 3181 - DNA, 24 bp, Artificial Sequence
  Synthetic oligonucleotide
caatttgcacttcagcctcaactt

SEQ ID NO: 3182 - DNA, 25 bp, Artificial Sequence
  Synthetic oligonucleotide
caatttgcacttcagcctcaacttt

SEQ ID NO: 3183 - DNA, 25 bp, Artificial Sequence
  Synthetic oligonucleotide
ctatcaatttgcacttcagcctcaa

SEQ ID NO: 3184 - DNA, 22 bp, Artificial Sequence
  Synthetic oligonucleotide
tgcacttcagcctcaactttgt

SEQ ID NO: 3185 - DNA, 22 bp, Artificial Sequence
  Synthetic oligonucleotide
gcacttcagcctcaactttgtc

SEQ ID NO: 3186 - DNA, 22 bp, Artificial Sequence
  Synthetic oligonucleotide
tgcacttcagcctcaactttgt

SEQ ID NO: 3187 - DNA, 31 bp, Artificial Sequence; identical to SEQ ID NO: 2328
  Synthetic oligonucleotide

SEQ ID NO: 3188 - DNA, 26 bp, Artificial Sequence
  Synthetic oligonucleotide
cacgtgtgaaagaattagtgtatgca

SEQ ID NO: 3189 - DNA, 26 bp, Artificial Sequence
  Synthetic oligonucleotide
cacgtgtgaaagaattagtgtatgca

SEQ ID NO: 3190 - DNA, 26 bp, Artificial Sequence
  Synthetic oligonucleotide
cacgtgtgaaagaattagtgtatgca

SEQ ID NO: 3191 - DNA, 26 bp, Artificial Sequence
  Synthetic oligonucleotide
cacgtgtgaaagaattagtgtatgca

SEQ ID NO: 3192 - DNA, 32 bp, Artificial Sequence
  Synthetic oligonucleotide
tggaaaccatatgattgtaaaggaaagtaaca

SEQ ID NO: 3193 - DNA, 32 bp, Artificial Sequence; identical to SEQ ID NO: 3192
  Synthetic oligonucleotide

SEQ ID NO: 3194 - DNA, 30 bp, Artificial Sequence; identical to SEQ ID NO: 2574
  Synthetic oligonucleotide

SEQ ID NO: 3195 - DNA, 30 bp, Artificial Sequence; identical to SEQ ID NO: 2574
  Synthetic oligonucleotide

SEQ ID NO: 3196 - DNA, 27 bp, Artificial Sequence
  Synthetic oligonucleotide
aggcagaaactttttgttagactcagt

SEQ ID NO: 3197 - DNA, 27 bp, Artificial Sequence
  Synthetic oligonucleotide
acactggtagaatttctgtggtaacac

SEQ ID NO: 3198 - DNA, 27 bp, Artificial Sequence
  Synthetic oligonucleotide
acactggtagaatttctgtggtaacac

SEQ ID NO: 3199 - DNA, 25 bp, Artificial Sequence
  Synthetic oligonucleotide
ctggtagaatttctgtggtaacact

SEQ ID NO: 3200 - DNA, 24 bp, Artificial Sequence
  Synthetic oligonucleotide
tggtagaatttctgtggtaacact

SEQ ID NO: 3201 - DNA, 24 bp, Artificial Sequence
  Synthetic oligonucleotide
tggtagaatttctgtggtaacact

SEQ ID NO: 3202 - DNA, 24 bp, Artificial Sequence
  Synthetic oligonucleotide
tggtagaatttctgtggtaacact

SEQ ID NO: 3203 - DNA, 24 bp, Artificial Sequence
  Synthetic oligonucleotide
tggtagaatttctgtggtaacact

SEQ ID NO: 3204 - DNA, 27 bp, Artificial Sequence
  Synthetic oligonucleotide
acactggtagaatttctgtggtaacac

SEQ ID NO: 3205 - DNA, 27 bp, Artificial Sequence
  Synthetic oligonucleotide
acactggtagaatttctgtggtaacac

SEQ ID NO: 3206 - DNA, 29 bp, Artificial Sequence
  Synthetic oligonucleotide
cactggtagaatttctgtggtaacactaa

SEQ ID NO: 3207 - DNA, 28 bp, Artificial Sequence
  Synthetic oligonucleotide
cactggtagaatttctgtggtaacacta

SEQ ID NO: 3208 - DNA, 27 bp, Artificial Sequence
  Synthetic oligonucleotide
cactggtagaatttctgtggtaacact

SEQ ID NO: 3209 - DNA, 29 bp, Artificial Sequence
  Synthetic oligonucleotide
cttggtcatagacactggtagaatttctg

SEQ ID NO: 3210 - DNA, 27 bp, Artificial Sequence
  Synthetic oligonucleotide
gacactggtagaatttctgtggtaaca

SEQ ID NO: 3211 - DNA, 29 bp, Artificial Sequence
  Synthetic oligonucleotide
gtcttggtcatagacactggtagaatttc

SEQ ID NO: 3212 - DNA, 29 bp, Artificial Sequence
  Synthetic oligonucleotide
tcttggtcatagacactggtagaatttct

SEQ ID NO: 3213 - DNA, 28 bp, Artificial Sequence
  Synthetic oligonucleotide
tggtcatagacactggtagaatttctgt

SEQ ID NO: 3214 - DNA, 29 bp, Artificial Sequence
  Synthetic oligonucleotide
cactggtagaatttctgtggtaacactaa

SEQ ID NO: 3215 - DNA, 28 bp, Artificial Sequence
  Synthetic oligonucleotide
cactggtagaatttctgtggtaacacta

SEQ ID NO: 3216 - DNA, 30 bp, Artificial Sequence
  Synthetic oligonucleotide
cactggtagaatttctgtggtaacactaat

SEQ ID NO: 3217 - DNA, 27 bp, Artificial Sequence
  Synthetic oligonucleotide
cactggtagaatttctgtggtaacact

SEQ ID NO: 3218 - DNA, 29 bp, Artificial Sequence
  Synthetic oligonucleotide
cttggtcatagacactggtagaatttctg

SEQ ID NO: 3219 - DNA, 27 bp, Artificial Sequence
  Synthetic oligonucleotide
gacactggtagaatttctgtggtaaca

SEQ ID NO: 3220 - DNA, 29 bp, Artificial Sequence
  Synthetic oligonucleotide
gtcttggtcatagacactggtagaatttc

SEQ ID NO: 3221 - DNA, 29 bp, Artificial Sequence
  Synthetic oligonucleotide
tcttggtcatagacactggtagaatttct

SEQ ID NO: 3222 - DNA, 28 bp, Artificial Sequence
  Synthetic oligonucleotide
tggtcatagacactggtagaatttctgt

SEQ ID NO: 3223 - DNA, 27 bp, Artificial Sequence
  Synthetic oligonucleotide
acactggtagaatttctgtggtaacac

SEQ ID NO: 3224 - DNA, 27 bp, Artificial Sequence
  Synthetic oligonucleotide
acactggtagaatttctgtggtaacac

SEQ ID NO: 3225 - DNA, 29 bp, Artificial Sequence
  Synthetic oligonucleotide
cactggtagaatttctgtggtaacactaa

SEQ ID NO: 3226 - DNA, 28 bp, Artificial Sequence
  Synthetic oligonucleotide
cactggtagaatttctgtggtaacacta

SEQ ID NO: 3227 - DNA, 30 bp, Artificial Sequence; identical to SEQ ID NO: 3216
  Synthetic oligonucleotide

SEQ ID NO: 3228 - DNA, 27 bp, Artificial Sequence
  Synthetic oligonucleotide
cactggtagaatttctgtggtaacact

SEQ ID NO: 3229 - DNA, 29 bp, Artificial Sequence
  Synthetic oligonucleotide
cactggtagaatttctgtggtaacactaa

SEQ ID NO: 3230 - DNA, 28 bp, Artificial Sequence
  Synthetic oligonucleotide
cactggtagaatttctgtggtaacacta

SEQ ID NO: 3231 - DNA, 27 bp, Artificial Sequence
  Synthetic oligonucleotide
cactggtagaatttctgtggtaacact

SEQ ID NO: 3232 - DNA, 29 bp, Artificial Sequence
  Synthetic oligonucleotide
cttggtcatagacactggtagaatttctg

SEQ ID NO: 3233 - DNA, 27 bp, Artificial Sequence
  Synthetic oligonucleotide
gacactggtagaatttctgtggtaaca

SEQ ID NO: 3234 - DNA, 29 bp, Artificial Sequence
  Synthetic oligonucleotide
gtcttggtcatagacactggtagaatttc

SEQ ID NO: 3235 - DNA, 27 bp, Artificial Sequence
  Synthetic oligonucleotide
acactggtagaatttctgtggtaacac

SEQ ID NO: 3236 - DNA, 27 bp, Artificial Sequence
  Synthetic oligonucleotide
cactggtagaatttctgtggtaacact

SEQ ID NO: 3237 - DNA, 27 bp, Artificial Sequence
  Synthetic oligonucleotide
gacactggtagaatttctgtggtaaca

SEQ ID NO: 3238 - DNA, 29 bp, Artificial Sequence
  Synthetic oligonucleotide
tcttggtcatagacactggtagaatttct

SEQ ID NO: 3239 - DNA, 29 bp, Artificial Sequence
  Synthetic oligonucleotide
tcttggtcatagacactggtagaatttct

SEQ ID NO: 3240 - DNA, 28 bp, Artificial Sequence
  Synthetic oligonucleotide
tggtcatagacactggtagaatttctgt

SEQ ID NO: 3241 - DNA, 29 bp, Artificial Sequence
  Synthetic oligonucleotide
cttggtcatagacactggtagaatttctg

SEQ ID NO: 3242 - DNA, 27 bp, Artificial Sequence
  Synthetic oligonucleotide
gacactggtagaatttctgtggtaaca

SEQ ID NO: 3243 - DNA, 29 bp, Artificial Sequence
  Synthetic oligonucleotide
gtcttggtcatagacactggtagaatttc

SEQ ID NO: 3244 - DNA, 29 bp, Artificial Sequence
  Synthetic oligonucleotide
tcttggtcatagacactggtagaatttct

SEQ ID NO: 3245 - DNA, 28 bp, Artificial Sequence
  Synthetic oligonucleotide
tggtcatagacactggtagaatttctgt

SEQ ID NO: 3246 - DNA, 27 bp, Artificial Sequence
  Synthetic oligonucleotide
acactggtagaatttctgtggtaacac

SEQ ID NO: 3247 - DNA, 27 bp, Artificial Sequence
  Synthetic oligonucleotide
cactggtagaatttctgtggtaacact

SEQ ID NO: 3248 - DNA, 27 bp, Artificial Sequence
  Synthetic oligonucleotide
gacactggtagaatttctgtggtaaca

SEQ ID NO: 3249 - DNA, 29 bp, Artificial Sequence
  Synthetic oligonucleotide
tcttggtcatagacactggtagaatttct

SEQ ID NO: 3250 - DNA, 27 bp, Artificial Sequence
  Synthetic oligonucleotide
acactggtagaatttctgtggtaacac

SEQ ID NO: 3251 - DNA, 29 bp, Artificial Sequence
  Synthetic oligonucleotide
cactggtagaatttctgtggtaacactaa

SEQ ID NO: 3252 - DNA, 28 bp, Artificial Sequence
  Synthetic oligonucleotide
cactggtagaatttctgtggtaacacta

SEQ ID NO: 3253 - DNA, 27 bp, Artificial Sequence
  Synthetic oligonucleotide
cactggtagaatttctgtggtaacact

SEQ ID NO: 3254 - DNA, 29 bp, Artificial Sequence
  Synthetic oligonucleotide
cttggtcatagacactggtagaatttctg

SEQ ID NO: 3255 - DNA, 27 bp, Artificial Sequence
  Synthetic oligonucleotide
gacactggtagaatttctgtggtaaca

SEQ ID NO: 3256 - DNA, 29 bp, Artificial Sequence
  Synthetic oligonucleotide
gtcttggtcatagacactggtagaatttc

SEQ ID NO: 3257 - DNA, 29 bp, Artificial Sequence
  Synthetic oligonucleotide
tcttggtcatagacactggtagaatttct

SEQ ID NO: 3258 - DNA, 28 bp, Artificial Sequence
  Synthetic oligonucleotide
tggtcatagacactggtagaatttctgt

SEQ ID NO: 3259 - DNA, 27 bp, Artificial Sequence
  Synthetic oligonucleotide
acactggtagaatttctgtggtaacac

SEQ ID NO: 3260 - DNA, 29 bp, Artificial Sequence
  Synthetic oligonucleotide
cactggtagaatttctgtggtaacactaa

SEQ ID NO: 3261 - DNA, 28 bp, Artificial Sequence
  Synthetic oligonucleotide
cactggtagaatttctgtggtaacacta

SEQ ID NO: 3262 - DNA, 27 bp, Artificial Sequence
  Synthetic oligonucleotide
cactggtagaatttctgtggtaacact

SEQ ID NO: 3263 - DNA, 29 bp, Artificial Sequence
  Synthetic oligonucleotide
cttggtcatagacactggtagaatttctg

SEQ ID NO: 3264 - DNA, 27 bp, Artificial Sequence
  Synthetic oligonucleotide
gacactggtagaatttctgtggtaaca

SEQ ID NO: 3265 - DNA, 29 bp, Artificial Sequence
  Synthetic oligonucleotide
gtcttggtcatagacactggtagaatttc

SEQ ID NO: 3266 - DNA, 29 bp, Artificial Sequence
  Synthetic oligonucleotide
tcttggtcatagacactggtagaatttct

SEQ ID NO: 3267 - DNA, 28 bp, Artificial Sequence
  Synthetic oligonucleotide
tggtcatagacactggtagaatttctgt

SEQ ID NO: 3268 - DNA, 25 bp, Artificial Sequence
  Synthetic oligonucleotide
ctgcattcagttgaatcaccacaaa

SEQ ID NO: 3269 - DNA, 29 bp, Artificial Sequence
  Synthetic oligonucleotide
ctaaagtagtaccaaaaatccagcctctt

SEQ ID NO: 3270 - DNA, 29 bp, Artificial Sequence
  Synthetic oligonucleotide
ctaaagtagtaccaaaaatccagcctctt

SEQ ID NO: 3271 - DNA, 20 bp, Artificial Sequence
  Synthetic oligonucleotide
aacctcattgaggcggtcaa

SEQ ID NO: 3272 - DNA, 27 bp, Artificial Sequence
  Synthetic oligonucleotide
gtactactactctgtatggttggtaac

SEQ ID NO: 3273 - DNA, 29 bp, Artificial Sequence
  Synthetic oligonucleotide
agtactactactctgtatggttggtaacc

SEQ ID NO: 3274 - DNA, 20 bp, Artificial Sequence
  Synthetic oligonucleotide
aacctcattgaggcggtcaa

SEQ ID NO: 3275 - DNA, 20 bp, Artificial Sequence
  Synthetic oligonucleotide
aacctcattgaggcggtcaa

SEQ ID NO: 3276 - DNA, 20 bp, Artificial Sequence
  Synthetic oligonucleotide
tgctgattattctgtcctat

SEQ ID NO: 3277 - DNA, 23 bp, Artificial Sequence
  Synthetic oligonucleotide
tgttgctgattattctgtcctat

SEQ ID NO: 3278 - DNA, 20 bp, Artificial Sequence
  Synthetic oligonucleotide
gcaattccaccggtgatcca

SEQ ID NO: 3279 - DNA, 25 bp, Artificial Sequence
  Synthetic oligonucleotide
gtaggacagggttatcaaacctctt

SEQ ID NO: 3280 - DNA, 25 bp, Artificial Sequence
  Synthetic oligonucleotide
gtaggacagggttatcaaacctctt

SEQ ID NO: 3281 - DNA, 27 bp, Artificial Sequence
  Synthetic oligonucleotide
ccatcattaaatggtaggacagggtta

SEQ ID NO: 3282 - DNA, 26 bp, Artificial Sequence
  Synthetic oligonucleotide
gctgagagacatattcaaaagtgcaa

SEQ ID NO: 3283 - DNA, 26 bp, Artificial Sequence
  Synthetic oligonucleotide
gctgagagacatattcaaaagtgcaa

SEQ ID NO: 3284 - DNA, 27 bp, Artificial Sequence
  Synthetic oligonucleotide
cgcactagaataaactctgaactcact

SEQ ID NO: 3285 - DNA, 31 bp, Artificial Sequence
  Synthetic oligonucleotide
catattcaaaagtgcaattattcgcactaga

SEQ ID NO: 3286 - DNA, 26 bp, Artificial Sequence
  Synthetic oligonucleotide
agtcctaggttgaagataacccacat

SEQ ID NO: 3287 - DNA, 26 bp, Artificial Sequence
  Synthetic oligonucleotide
agtcctaggttgaagataacccacat

SEQ ID NO: 3288 - DNA, 26 bp, Artificial Sequence
  Synthetic oligonucleotide
gctgagagacatattcaaaagtgcaa

SEQ ID NO: 3289 - DNA, 26 bp, Artificial Sequence
  Synthetic oligonucleotide
gctgagagacatattcaaaagtgcaa

SEQ ID NO: 3290 - DNA, 32 bp, Artificial Sequence; identical to SEQ ID NO: 2412
  Synthetic oligonucleotide

SEQ ID NO: 3291 - DNA, 21 bp, Artificial Sequence
  Synthetic oligonucleotide
ctaccggcctgatagatttca

SEQ ID NO: 3292 - DNA, 22 bp, Artificial Sequence
  Synthetic oligonucleotide
gctaccggcctgatagatttca

SEQ ID NO: 3293 - DNA, 26 bp, Artificial Sequence
  Synthetic oligonucleotide
gctgagagacatattcaaaagtgcaa

SEQ ID NO: 3294 - DNA, 26 bp, Artificial Sequence
  Synthetic oligonucleotide
gctgagagacatattcaaaagtgcaa

SEQ ID NO: 3295 - DNA, 25 bp, Artificial Sequence
  Synthetic oligonucleotide
caacacctcctccatgtttaaggta

SEQ ID NO: 3296 - DNA, 25 bp, Artificial Sequence
  Synthetic oligonucleotide
gcctcataaaactcaggttcccaat

SEQ ID NO: 3297 - DNA, 25 bp, Artificial Sequence
  Synthetic oligonucleotide
gcctcataaaactcaggttcccaat

SEQ ID NO: 3298 - DNA, 25 bp, Artificial Sequence
  Synthetic oligonucleotide
gcctcataaaactcaggttcccaat

SEQ ID NO: 3299 - DNA, 20 bp, Artificial Sequence
  Synthetic oligonucleotide
gggtccaccaaacgtaatgc

SEQ ID NO: 3300 - DNA, 20 bp, Artificial Sequence
  Synthetic oligonucleotide
gggtccaccaaacgtaatgc

SEQ ID NO: 3301 - DNA, 20 bp, Artificial Sequence
  Synthetic oligonucleotide
gggtccaccaaacgtaatgc

SEQ ID NO: 3302 - DNA, 21 bp, Artificial Sequence
  Synthetic oligonucleotide
cgggtaacaccactgctatgt

SEQ ID NO: 3303 - DNA, 21 bp, Artificial Sequence
  Synthetic oligonucleotide
cgggtaacaccactgctatgt

SEQ ID NO: 3304 - DNA, 21 bp, Artificial Sequence
  Synthetic oligonucleotide
cgggtaacaccactgctatgt

SEQ ID NO: 3305-4000 - skipped (696 entries)

SEQ ID NO: 4001 - DNA, 19 bp, Artificial Sequence
  Synthetic oligonucleotide
cctgccaattcaactgtat

SEQ ID NO: 4002 - DNA, 16 bp, Artificial Sequence
  Synthetic oligonucleotide
acaaaaggaaaagcta

SEQ ID NO: 4003 - DNA, 15 bp, Artificial Sequence
  Synthetic oligonucleotide
atacaccaaaagatc

SEQ ID NO: 4004 - DNA, 15 bp, Artificial Sequence
  Synthetic oligonucleotide
atacaccaaaagatc

SEQ ID NO: 4005 - DNA, 15 bp, Artificial Sequence
  Synthetic oligonucleotide
atacaccaaaagatc

SEQ ID NO: 4006 - DNA, 20 bp, Artificial Sequence
  Synthetic oligonucleotide
ttttcaaacctaatactcta

SEQ ID NO: 4007 - DNA, 18 bp, Artificial Sequence
  Synthetic oligonucleotide
atcagacattttagtttg

SEQ ID NO: 4008 - DNA, 14 bp, Artificial Sequence
  Synthetic oligonucleotide
aagcctcggcaaaa

SEQ ID NO: 4009 - DNA, 17 bp, Artificial Sequence
  Synthetic oligonucleotide
accttgtacgtgtggta

SEQ ID NO: 4010 - DNA, 21 bp, Artificial Sequence
  Synthetic oligonucleotide
cagataccttgtacgtgtggt

SEQ ID NO: 4011 - DNA, 17 bp, Artificial Sequence
  Synthetic oligonucleotide
accttgtacgtgtggta

SEQ ID NO: 4012 - DNA, 15 bp, Artificial Sequence
  Synthetic oligonucleotide
tcctgctagaatggc

SEQ ID NO: 4013 - DNA, 14 bp, Artificial Sequence
  Synthetic oligonucleotide
aaggctgatgaaac

SEQ ID NO: 4014 - DNA, 16 bp, Artificial Sequence
  Synthetic oligonucleotide
tccattatcagacatt

SEQ ID NO: 4015 - DNA, 21 bp, Artificial Sequence
  Synthetic oligonucleotide
ctaaaatgtctgataatggac

SEQ ID NO: 4016 - DNA, 13 bp, Artificial Sequence
  Synthetic oligonucleotide
ccactgcgttctc

SEQ ID NO: 4017 - DNA, 14 bp, Artificial Sequence
  Synthetic oligonucleotide
cccactgcgttctc

SEQ ID NO: 4018 - DNA, 11 bp, Artificial Sequence
  Synthetic oligonucleotide
ctggcaatggc

SEQ ID NO: 4019 - DNA, 14 bp, Artificial Sequence
  Synthetic oligonucleotide
atggctggcaatgg

SEQ ID NO: 4020 - DNA, 14 bp, Artificial Sequence
  Synthetic oligonucleotide
ctgcctggagttga

SEQ ID NO: 4021 - DNA, 14 bp, Artificial Sequence
  Synthetic oligonucleotide
ctgcctggagttga

SEQ ID NO: 4022 - DNA, 16 bp, Artificial Sequence
  Synthetic oligonucleotide
ctgtctctgcggtaag

SEQ ID NO: 4023 - DNA, 13 bp, Artificial Sequence
  Synthetic oligonucleotide
tcgagggaattta

SEQ ID NO: 4024 - DNA, 16 bp, Artificial Sequence
  Synthetic oligonucleotide
ctcaactcaggcctaa

SEQ ID NO: 4025 - DNA, 16 bp, Artificial Sequence
  Synthetic oligonucleotide
cttctcgttcctcatc

SEQ ID NO: 4026 - DNA, 16 bp, Artificial Sequence
  Synthetic oligonucleotide
tacgtgatgaggaacg

SEQ ID NO: 4027 - DNA, 17 bp, Artificial Sequence
  Synthetic oligonucleotide
ttcaagaaattcaactc

SEQ ID NO: 4028 - DNA, 17 bp, Artificial Sequence
  Synthetic oligonucleotide
caaaagttagcagcttc

SEQ ID NO: 4029 - DNA, 20 bp, Artificial Sequence
  Synthetic oligonucleotide
atgtacatcttctttgcatc

SEQ ID NO: 4030 - DNA, 14 bp, Artificial Sequence
  Synthetic oligonucleotide
tcaagccatttcca

SEQ ID NO: 4031 - DNA, 15 bp, Artificial Sequence
  Synthetic oligonucleotide
aagctacaaaatatc

SEQ ID NO: 4032 - DNA, 17 bp, Artificial Sequence
  Synthetic oligonucleotide
caagctacaaaatatct

SEQ ID NO: 4033 - DNA, 15 bp, Artificial Sequence
  Synthetic oligonucleotide
aatggacaagttttt

SEQ ID NO: 4034 - DNA, 16 bp, Artificial Sequence
  Synthetic oligonucleotide
tgccaattcaactgta

SEQ ID NO: 4035 - DNA, 16 bp, Artificial Sequence
  Synthetic oligonucleotide
tgccaattcaactgta

SEQ ID NO: 4036 - DNA, 14 bp, Artificial Sequence
  Synthetic oligonucleotide
aagctgctaacttt

SEQ ID NO: 4037 - DNA, 14 bp, Artificial Sequence
  Synthetic oligonucleotide
aagctgctaacttt

SEQ ID NO: 4038 - DNA, 14 bp, Artificial Sequence
  Synthetic oligonucleotide
aagctgctaacttt

SEQ ID NO: 4039 - DNA, 14 bp, Artificial Sequence
  Synthetic oligonucleotide
aagctgctaacttt

SEQ ID NO: 4040 - DNA, 14 bp, Artificial Sequence
  Synthetic oligonucleotide
aagctgctaacttt

SEQ ID NO: 4041 - DNA, 14 bp, Artificial Sequence
  Synthetic oligonucleotide
aagctgctaacttt

SEQ ID NO: 4042 - DNA, 14 bp, Artificial Sequence
  Synthetic oligonucleotide
aagctgctaacttt

SEQ ID NO: 4043 - DNA, 14 bp, Artificial Sequence
  Synthetic oligonucleotide
aagctgctaacttt

SEQ ID NO: 4044 - DNA, 14 bp, Artificial Sequence
  Synthetic oligonucleotide
aagctgctaacttt

SEQ ID NO: 4045 - DNA, 14 bp, Artificial Sequence
  Synthetic oligonucleotide
aagctgctaacttt

SEQ ID NO: 4046 - DNA, 14 bp, Artificial Sequence
  Synthetic oligonucleotide
aagctgctaacttt

SEQ ID NO: 4047 - DNA, 14 bp, Artificial Sequence
  Synthetic oligonucleotide
aagctgctaacttt

SEQ ID NO: 4048 - DNA, 14 bp, Artificial Sequence
  Synthetic oligonucleotide
aagctgctaacttt

SEQ ID NO: 4049 - DNA, 14 bp, Artificial Sequence
  Synthetic oligonucleotide
aagctgctaacttt

SEQ ID NO: 4050 - DNA, 14 bp, Artificial Sequence
  Synthetic oligonucleotide
aagctgctaacttt

SEQ ID NO: 4051 - DNA, 14 bp, Artificial Sequence
  Synthetic oligonucleotide
aagctgctaacttt

SEQ ID NO: 4052 - DNA, 14 bp, Artificial Sequence
  Synthetic oligonucleotide
aagctgctaacttt

SEQ ID NO: 4053 - DNA, 14 bp, Artificial Sequence
  Synthetic oligonucleotide
aagctgctaacttt

SEQ ID NO: 4054 - DNA, 14 bp, Artificial Sequence
  Synthetic oligonucleotide
aagctgctaacttt

SEQ ID NO: 4055 - DNA, 14 bp, Artificial Sequence
  Synthetic oligonucleotide
aagctgctaacttt

SEQ ID NO: 4056 - DNA, 14 bp, Artificial Sequence
  Synthetic oligonucleotide
aagctgctaacttt

SEQ ID NO: 4057 - DNA, 14 bp, Artificial Sequence
  Synthetic oligonucleotide
aagctgctaacttt

SEQ ID NO: 4058 - DNA, 14 bp, Artificial Sequence
  Synthetic oligonucleotide
aagctgctaacttt

SEQ ID NO: 4059 - DNA, 14 bp, Artificial Sequence
  Synthetic oligonucleotide
aagctgctaacttt

SEQ ID NO: 4060 - DNA, 20 bp, Artificial Sequence
  Synthetic oligonucleotide
atgtacatcttctttgcatc

SEQ ID NO: 4061 - DNA, 16 bp, Artificial Sequence
  Synthetic oligonucleotide
cacaacattgctttga

SEQ ID NO: 4062 - DNA, 20 bp, Artificial Sequence
  Synthetic oligonucleotide
aagtcacaacattgctttga

SEQ ID NO: 4063 - DNA, 14 bp, Artificial Sequence
  Synthetic oligonucleotide
tcaagccatttcca

SEQ ID NO: 4064 - DNA, 14 bp, Artificial Sequence
  Synthetic oligonucleotide
tcaagccatttcca

SEQ ID NO: 4065 - DNA, 16 bp, Artificial Sequence
  Synthetic oligonucleotide
ttggcacttttctcaa

SEQ ID NO: 4066 - DNA, 18 bp, Artificial Sequence
  Synthetic oligonucleotide
cttttacactttttaagc

SEQ ID NO: 4067 - DNA, 15 bp, Artificial Sequence
  Synthetic oligonucleotide
caaagcttgtttatg

SEQ ID NO: 4068 - DNA, 16 bp, Artificial Sequence
  Synthetic oligonucleotide
ccaagctaaaacatta

SEQ ID NO: 4069 - DNA, 20 bp, Artificial Sequence
  Synthetic oligonucleotide
cttgaaaaccattcttcgta

SEQ ID NO: 4070 - DNA, 15 bp, Artificial Sequence
  Synthetic oligonucleotide
catctgacattttag

SEQ ID NO: 4071 - DNA, 18 bp, Artificial Sequence
  Synthetic oligonucleotide
cttccggtgtaactgtta

SEQ ID NO: 4072 - DNA, 16 bp, Artificial Sequence
  Synthetic oligonucleotide
tccggtgtaactgtta

SEQ ID NO: 4073 - DNA, 17 bp, Artificial Sequence
  Synthetic oligonucleotide
atgttgcaaattatcaa

SEQ ID NO: 4074 - DNA, 14 bp, Artificial Sequence
  Synthetic oligonucleotide
cgtgttgtacgatc

SEQ ID NO: 4075 - DNA, 19 bp, Artificial Sequence
  Synthetic oligonucleotide
aagagtcattttgctattg

SEQ ID NO: 4076 - DNA, 17 bp, Artificial Sequence
  Synthetic oligonucleotide
aatgttactgactttaa

SEQ ID NO: 4077 - DNA, 16 bp, Artificial Sequence
  Synthetic oligonucleotide
ctgtactgaaagactc

SEQ ID NO: 4078 - DNA, 15 bp, Artificial Sequence
  Synthetic oligonucleotide
ctcttgtggcactag

SEQ ID NO: 4079 - DNA, 13 bp, Artificial Sequence
  Synthetic oligonucleotide
agcaggacaacgc

SEQ ID NO: 4080 - DNA, 15 bp, Artificial Sequence
  Synthetic oligonucleotide
acaaccaggcaagtt

SEQ ID NO: 4081 - DNA, 16 bp, Artificial Sequence
  Synthetic oligonucleotide
aacatacggattaaca

SEQ ID NO: 4082 - DNA, 15 bp, Artificial Sequence
  Synthetic oligonucleotide
aatggacaagttttt

SEQ ID NO: 4083 - DNA, 15 bp, Artificial Sequence
  Synthetic oligonucleotide
aatggacaagttttt

SEQ ID NO: 4084 - DNA, 14 bp, Artificial Sequence
  Synthetic oligonucleotide
acccggttgccacg

SEQ ID NO: 4085 - DNA, 15 bp, Artificial Sequence
  Synthetic oligonucleotide
ttgagctgatttgtc

SEQ ID NO: 4086 - DNA, 14 bp, Artificial Sequence
  Synthetic oligonucleotide
ttgcggacatactt

SEQ ID NO: 4087 - DNA, 17 bp, Artificial Sequence
  Synthetic oligonucleotide
acaaaatctgaaggagt

SEQ ID NO: 4088 - DNA, 19 bp, Artificial Sequence
  Synthetic oligonucleotide
cgaacaaaatctgaaggag

SEQ ID NO: 4089 - DNA, 16 bp, Artificial Sequence
  Synthetic oligonucleotide
acaacagatgtttcat

SEQ ID NO: 4090 - DNA, 16 bp, Artificial Sequence
  Synthetic oligonucleotide
acaacagatgtttcat

SEQ ID NO: 4091 - DNA, 16 bp, Artificial Sequence
  Synthetic oligonucleotide
caacgagatgaaacat

SEQ ID NO: 4092 - DNA, 17 bp, Artificial Sequence
  Synthetic oligonucleotide
caatcattctgtctttc

SEQ ID NO: 4093 - DNA, 18 bp, Artificial Sequence
  Synthetic oligonucleotide
catgtactcaacatcaac

SEQ ID NO: 4094 - DNA, 16 bp, Artificial Sequence
  Synthetic oligonucleotide
tgtactcaacatcaac

SEQ ID NO: 4095 - DNA, 14 bp, Artificial Sequence
  Synthetic oligonucleotide
tgtactcaacatca

SEQ ID NO: 4096 - DNA, 17 bp, Artificial Sequence
  Synthetic oligonucleotide
tggttgatgttgagtac

SEQ ID NO: 4097 - DNA, 16 bp, Artificial Sequence
  Synthetic oligonucleotide
ttgatgttgagtacat

SEQ ID NO: 4098 - DNA, 16 bp, Artificial Sequence
  Synthetic oligonucleotide
tgtactcaacatcaac

SEQ ID NO: 4099 - DNA, 14 bp, Artificial Sequence
  Synthetic oligonucleotide
tgtactcaacatca

SEQ ID NO: 4100 - DNA, 17 bp, Artificial Sequence
  Synthetic oligonucleotide
tggttgatgttgagtac

SEQ ID NO: 4101 - DNA, 16 bp, Artificial Sequence
  Synthetic oligonucleotide
ttgatgttgagtacat

SEQ ID NO: 4102 - DNA, 14 bp, Artificial Sequence
  Synthetic oligonucleotide
aggtttgataaccc

SEQ ID NO: 4103 - DNA, 18 bp, Artificial Sequence
  Synthetic oligonucleotide
acagtcatgtactcaaca

SEQ ID NO: 4104 - DNA, 18 bp, Artificial Sequence
  Synthetic oligonucleotide
acagtcatgtactcaaca

SEQ ID NO: 4105 - DNA, 18 bp, Artificial Sequence
  Synthetic oligonucleotide
acagtcatgtactcaaca

SEQ ID NO: 4106 - DNA, 18 bp, Artificial Sequence
  Synthetic oligonucleotide
acagtcatgtactcaaca

SEQ ID NO: 4107 - DNA, 18 bp, Artificial Sequence
  Synthetic oligonucleotide
acagtcatgtactcaaca

SEQ ID NO: 4108 - DNA, 18 bp, Artificial Sequence
  Synthetic oligonucleotide
acagtcatgtactcaaca

SEQ ID NO: 4109 - DNA, 18 bp, Artificial Sequence
  Synthetic oligonucleotide
acagtcatgtactcaaca

SEQ ID NO: 4110 - DNA, 18 bp, Artificial Sequence
  Synthetic oligonucleotide
acagtcatgtactcaaca

SEQ ID NO: 4111 - DNA, 18 bp, Artificial Sequence
  Synthetic oligonucleotide
acagtcatgtactcaaca

SEQ ID NO: 4112 - DNA, 18 bp, Artificial Sequence
  Synthetic oligonucleotide
acagtcatgtactcaaca

SEQ ID NO: 4113 - DNA, 18 bp, Artificial Sequence
  Synthetic oligonucleotide
acagtcatgtactcaaca

SEQ ID NO: 4114 - DNA, 18 bp, Artificial Sequence
  Synthetic oligonucleotide
acagtcatgtactcaaca

SEQ ID NO: 4115 - DNA, 18 bp, Artificial Sequence
  Synthetic oligonucleotide
acagtcatgtactcaaca

SEQ ID NO: 4116 - DNA, 18 bp, Artificial Sequence
  Synthetic oligonucleotide
acagtcatgtactcaaca

SEQ ID NO: 4117 - DNA, 18 bp, Artificial Sequence
  Synthetic oligonucleotide
acagtcatgtactcaaca

SEQ ID NO: 4118 - DNA, 18 bp, Artificial Sequence
  Synthetic oligonucleotide
acagtcatgtactcaaca

SEQ ID NO: 4119 - DNA, 18 bp, Artificial Sequence
  Synthetic oligonucleotide
acagtcatgtactcaaca

SEQ ID NO: 4120 - DNA, 18 bp, Artificial Sequence
  Synthetic oligonucleotide
acagtcatgtactcaaca

SEQ ID NO: 4121 - DNA, 18 bp, Artificial Sequence
  Synthetic oligonucleotide
acagtcatgtactcaaca

SEQ ID NO: 4122 - DNA, 18 bp, Artificial Sequence
  Synthetic oligonucleotide
acagtcatgtactcaaca

SEQ ID NO: 4123 - DNA, 18 bp, Artificial Sequence
  Synthetic oligonucleotide
acagtcatgtactcaaca

SEQ ID NO: 4124 - DNA, 18 bp, Artificial Sequence
  Synthetic oligonucleotide
acagtcatgtactcaaca

SEQ ID NO: 4125 - DNA, 18 bp, Artificial Sequence
  Synthetic oligonucleotide
acagtcatgtactcaaca

SEQ ID NO: 4126 - DNA, 18 bp, Artificial Sequence
  Synthetic oligonucleotide
acagtcatgtactcaaca

SEQ ID NO: 4127 - DNA, 18 bp, Artificial Sequence
  Synthetic oligonucleotide
acagtcatgtactcaaca

SEQ ID NO: 4128 - DNA, 18 bp, Artificial Sequence
  Synthetic oligonucleotide
acagtcatgtactcaaca

SEQ ID NO: 4129 - DNA, 18 bp, Artificial Sequence
  Synthetic oligonucleotide
acagtcatgtactcaaca

SEQ ID NO: 4130 - DNA, 18 bp, Artificial Sequence
  Synthetic oligonucleotide
acagtcatgtactcaaca

SEQ ID NO: 4131 - DNA, 18 bp, Artificial Sequence
  Synthetic oligonucleotide
acagtcatgtactcaaca

SEQ ID NO: 4132 - DNA, 18 bp, Artificial Sequence
  Synthetic oligonucleotide
acagtcatgtactcaaca

SEQ ID NO: 4133 - DNA, 18 bp, Artificial Sequence
  Synthetic oligonucleotide
acagtcatgtactcaaca

SEQ ID NO: 4134 - DNA, 18 bp, Artificial Sequence
  Synthetic oligonucleotide
acagtcatgtactcaaca

SEQ ID NO: 4135 - DNA, 18 bp, Artificial Sequence
  Synthetic oligonucleotide
acagtcatgtactcaaca

SEQ ID NO: 4136 - DNA, 18 bp, Artificial Sequence
  Synthetic oligonucleotide
acagtcatgtactcaaca

SEQ ID NO: 4137 - DNA, 18 bp, Artificial Sequence
  Synthetic oligonucleotide
acagtcatgtactcaaca

SEQ ID NO: 4138 - DNA, 18 bp, Artificial Sequence
  Synthetic oligonucleotide
acagtcatgtactcaaca

SEQ ID NO: 4139 - DNA, 18 bp, Artificial Sequence
  Synthetic oligonucleotide
acagtcatgtactcaaca

SEQ ID NO: 4140 - DNA, 18 bp, Artificial Sequence
  Synthetic oligonucleotide
acagtcatgtactcaaca

SEQ ID NO: 4141 - DNA, 18 bp, Artificial Sequence
  Synthetic oligonucleotide
acagtcatgtactcaaca

SEQ ID NO: 4142 - DNA, 18 bp, Artificial Sequence
  Synthetic oligonucleotide
acagtcatgtactcaaca

SEQ ID NO: 4143 - DNA, 18 bp, Artificial Sequence
  Synthetic oligonucleotide
acagtcatgtactcaaca

SEQ ID NO: 4144 - DNA, 18 bp, Artificial Sequence
  Synthetic oligonucleotide
acagtcatgtactcaaca

SEQ ID NO: 4145 - DNA, 18 bp, Artificial Sequence
  Synthetic oligonucleotide
acagtcatgtactcaaca

SEQ ID NO: 4146 - DNA, 18 bp, Artificial Sequence
  Synthetic oligonucleotide
acagtcatgtactcaaca

SEQ ID NO: 4147 - DNA, 18 bp, Artificial Sequence
  Synthetic oligonucleotide
acagtcatgtactcaaca

SEQ ID NO: 4148 - DNA, 18 bp, Artificial Sequence
  Synthetic oligonucleotide
acagtcatgtactcaaca

SEQ ID NO: 4149 - DNA, 18 bp, Artificial Sequence
  Synthetic oligonucleotide
acagtcatgtactcaaca

SEQ ID NO: 4150 - DNA, 18 bp, Artificial Sequence
  Synthetic oligonucleotide
acagtcatgtactcaaca

SEQ ID NO: 4151 - DNA, 18 bp, Artificial Sequence
  Synthetic oligonucleotide
acagtcatgtactcaaca

SEQ ID NO: 4152 - DNA, 18 bp, Artificial Sequence
  Synthetic oligonucleotide
acagtcatgtactcaaca

SEQ ID NO: 4153 - DNA, 18 bp, Artificial Sequence
  Synthetic oligonucleotide
acagtcatgtactcaaca

SEQ ID NO: 4154 - DNA, 18 bp, Artificial Sequence
  Synthetic oligonucleotide
acagtcatgtactcaaca

SEQ ID NO: 4155 - DNA, 18 bp, Artificial Sequence
  Synthetic oligonucleotide
acagtcatgtactcaaca

SEQ ID NO: 4156 - DNA, 18 bp, Artificial Sequence
  Synthetic oligonucleotide
acagtcatgtactcaaca

SEQ ID NO: 4157 - DNA, 18 bp, Artificial Sequence
  Synthetic oligonucleotide
acagtcatgtactcaaca

SEQ ID NO: 4158 - DNA, 18 bp, Artificial Sequence
  Synthetic oligonucleotide
acagtcatgtactcaaca

SEQ ID NO: 4159 - DNA, 18 bp, Artificial Sequence
  Synthetic oligonucleotide
acagtcatgtactcaaca

SEQ ID NO: 4160 - DNA, 18 bp, Artificial Sequence
  Synthetic oligonucleotide
acagtcatgtactcaaca

SEQ ID NO: 4161 - DNA, 18 bp, Artificial Sequence
  Synthetic oligonucleotide
acagtcatgtactcaaca

SEQ ID NO: 4162 - DNA, 18 bp, Artificial Sequence
  Synthetic oligonucleotide
acagtcatgtactcaaca

SEQ ID NO: 4163 - DNA, 18 bp, Artificial Sequence
  Synthetic oligonucleotide
acagtcatgtactcaaca

SEQ ID NO: 4164 - DNA, 18 bp, Artificial Sequence
  Synthetic oligonucleotide
acagtcatgtactcaaca

SEQ ID NO: 4165 - DNA, 18 bp, Artificial Sequence
  Synthetic oligonucleotide
acagtcatgtactcaaca

SEQ ID NO: 4166 - DNA, 18 bp, Artificial Sequence
  Synthetic oligonucleotide
acagtcatgtactcaaca

SEQ ID NO: 4167 - DNA, 18 bp, Artificial Sequence
  Synthetic oligonucleotide
acagtcatgtactcaaca

SEQ ID NO: 4168 - DNA, 18 bp, Artificial Sequence
  Synthetic oligonucleotide
acagtcatgtactcaaca

SEQ ID NO: 4169 - DNA, 18 bp, Artificial Sequence
  Synthetic oligonucleotide
acagtcatgtactcaaca

SEQ ID NO: 4170 - DNA, 18 bp, Artificial Sequence
  Synthetic oligonucleotide
acagtcatgtactcaaca

SEQ ID NO: 4171 - DNA, 18 bp, Artificial Sequence
  Synthetic oligonucleotide
acagtcatgtactcaaca

SEQ ID NO: 4172 - DNA, 18 bp, Artificial Sequence
  Synthetic oligonucleotide
acagtcatgtactcaaca

SEQ ID NO: 4173 - DNA, 18 bp, Artificial Sequence
  Synthetic oligonucleotide
acagtcatgtactcaaca

SEQ ID NO: 4174 - DNA, 18 bp, Artificial Sequence
  Synthetic oligonucleotide
acagtcatgtactcaaca

SEQ ID NO: 4175 - DNA, 18 bp, Artificial Sequence
  Synthetic oligonucleotide
acagtcatgtactcaaca

SEQ ID NO: 4176 - DNA, 18 bp, Artificial Sequence
  Synthetic oligonucleotide
acagtcatgtactcaaca

SEQ ID NO: 4177 - DNA, 18 bp, Artificial Sequence
  Synthetic oligonucleotide
acagtcatgtactcaaca

SEQ ID NO: 4178 - DNA, 18 bp, Artificial Sequence
  Synthetic oligonucleotide
acagtcatgtactcaaca

SEQ ID NO: 4179 - DNA, 18 bp, Artificial Sequence
  Synthetic oligonucleotide
acagtcatgtactcaaca

SEQ ID NO: 4180 - DNA, 18 bp, Artificial Sequence
  Synthetic oligonucleotide
acagtcatgtactcaaca

SEQ ID NO: 4181 - DNA, 18 bp, Artificial Sequence
  Synthetic oligonucleotide
acagtcatgtactcaaca

SEQ ID NO: 4182 - DNA, 18 bp, Artificial Sequence
  Synthetic oligonucleotide
acagtcatgtactcaaca

SEQ ID NO: 4183 - DNA, 18 bp, Artificial Sequence
  Synthetic oligonucleotide
acagtcatgtactcaaca

SEQ ID NO: 4184 - DNA, 18 bp, Artificial Sequence
  Synthetic oligonucleotide
acagtcatgtactcaaca

SEQ ID NO: 4185 - DNA, 18 bp, Artificial Sequence
  Synthetic oligonucleotide
acagtcatgtactcaaca

SEQ ID NO: 4186 - DNA, 18 bp, Artificial Sequence
  Synthetic oligonucleotide
acagtcatgtactcaaca

SEQ ID NO: 4187 - DNA, 18 bp, Artificial Sequence
  Synthetic oligonucleotide
acagtcatgtactcaaca

SEQ ID NO: 4188 - DNA, 18 bp, Artificial Sequence
  Synthetic oligonucleotide
acagtcatgtactcaaca

SEQ ID NO: 4189 - DNA, 18 bp, Artificial Sequence
  Synthetic oligonucleotide
acagtcatgtactcaaca

SEQ ID NO: 4190 - DNA, 18 bp, Artificial Sequence
  Synthetic oligonucleotide
acagtcatgtactcaaca

SEQ ID NO: 4191 - DNA, 18 bp, Artificial Sequence
  Synthetic oligonucleotide
acagtcatgtactcaaca

SEQ ID NO: 4192 - DNA, 18 bp, Artificial Sequence
  Synthetic oligonucleotide
acagtcatgtactcaaca

SEQ ID NO: 4193 - DNA, 18 bp, Artificial Sequence
  Synthetic oligonucleotide
acagtcatgtactcaaca

SEQ ID NO: 4194 - DNA, 18 bp, Artificial Sequence
  Synthetic oligonucleotide
acagtcatgtactcaaca

SEQ ID NO: 4195 - DNA, 18 bp, Artificial Sequence
  Synthetic oligonucleotide
acagtcatgtactcaaca

SEQ ID NO: 4196 - DNA, 18 bp, Artificial Sequence
  Synthetic oligonucleotide
acagtcatgtactcaaca

SEQ ID NO: 4197 - DNA, 18 bp, Artificial Sequence
  Synthetic oligonucleotide
acagtcatgtactcaaca

SEQ ID NO: 4198 - DNA, 18 bp, Artificial Sequence
  Synthetic oligonucleotide
acagtcatgtactcaaca

SEQ ID NO: 4199 - DNA, 18 bp, Artificial Sequence
  Synthetic oligonucleotide
acagtcatgtactcaaca

SEQ ID NO: 4200 - DNA, 18 bp, Artificial Sequence
  Synthetic oligonucleotide
acagtcatgtactcaaca

SEQ ID NO: 4201 - DNA, 18 bp, Artificial Sequence
  Synthetic oligonucleotide
acagtcatgtactcaaca

SEQ ID NO: 4202 - DNA, 18 bp, Artificial Sequence
  Synthetic oligonucleotide
acagtcatgtactcaaca

SEQ ID NO: 4203 - DNA, 18 bp, Artificial Sequence
  Synthetic oligonucleotide
acagtcatgtactcaaca

SEQ ID NO: 4204 - DNA, 18 bp, Artificial Sequence
  Synthetic oligonucleotide
acagtcatgtactcaaca

SEQ ID NO: 4205 - DNA, 18 bp, Artificial Sequence
  Synthetic oligonucleotide
acagtcatgtactcaaca

SEQ ID NO: 4206 - DNA, 18 bp, Artificial Sequence
  Synthetic oligonucleotide
acagtcatgtactcaaca

SEQ ID NO: 4207 - DNA, 18 bp, Artificial Sequence
  Synthetic oligonucleotide
acagtcatgtactcaaca

SEQ ID NO: 4208 - DNA, 18 bp, Artificial Sequence
  Synthetic oligonucleotide
acagtcatgtactcaaca

SEQ ID NO: 4209 - DNA, 18 bp, Artificial Sequence
  Synthetic oligonucleotide
acagtcatgtactcaaca

SEQ ID NO: 4210 - DNA, 18 bp, Artificial Sequence
  Synthetic oligonucleotide
acagtcatgtactcaaca

SEQ ID NO: 4211 - DNA, 18 bp, Artificial Sequence
  Synthetic oligonucleotide
acagtcatgtactcaaca

SEQ ID NO: 4212 - DNA, 18 bp, Artificial Sequence
  Synthetic oligonucleotide
acagtcatgtactcaaca

SEQ ID NO: 4213 - DNA, 18 bp, Artificial Sequence
  Synthetic oligonucleotide
acagtcatgtactcaaca

SEQ ID NO: 4214 - DNA, 18 bp, Artificial Sequence
  Synthetic oligonucleotide
acagtcatgtactcaaca

SEQ ID NO: 4215 - DNA, 18 bp, Artificial Sequence
  Synthetic oligonucleotide
acagtcatgtactcaaca

SEQ ID NO: 4216 - DNA, 18 bp, Artificial Sequence
  Synthetic oligonucleotide
acagtcatgtactcaaca

SEQ ID NO: 4217 - DNA, 18 bp, Artificial Sequence
  Synthetic oligonucleotide
acagtcatgtactcaaca

SEQ ID NO: 4218 - DNA, 18 bp, Artificial Sequence
  Synthetic oligonucleotide
acagtcatgtactcaaca

SEQ ID NO: 4219 - DNA, 18 bp, Artificial Sequence
  Synthetic oligonucleotide
acagtcatgtactcaaca

SEQ ID NO: 4220 - DNA, 18 bp, Artificial Sequence
  Synthetic oligonucleotide
acagtcatgtactcaaca

SEQ ID NO: 4221 - DNA, 18 bp, Artificial Sequence
  Synthetic oligonucleotide
acagtcatgtactcaaca

SEQ ID NO: 4222 - DNA, 18 bp, Artificial Sequence
  Synthetic oligonucleotide
acagtcatgtactcaaca

SEQ ID NO: 4223 - DNA, 18 bp, Artificial Sequence
  Synthetic oligonucleotide
acagtcatgtactcaaca

SEQ ID NO: 4224 - DNA, 18 bp, Artificial Sequence
  Synthetic oligonucleotide
acagtcatgtactcaaca

SEQ ID NO: 4225 - DNA, 18 bp, Artificial Sequence
  Synthetic oligonucleotide
acagtcatgtactcaaca

SEQ ID NO: 4226 - DNA, 18 bp, Artificial Sequence
  Synthetic oligonucleotide
acagtcatgtactcaaca

SEQ ID NO: 4227 - DNA, 18 bp, Artificial Sequence
  Synthetic oligonucleotide
acagtcatgtactcaaca

SEQ ID NO: 4228 - DNA, 18 bp, Artificial Sequence
  Synthetic oligonucleotide
acagtcatgtactcaaca

SEQ ID NO: 4229 - DNA, 18 bp, Artificial Sequence
  Synthetic oligonucleotide
acagtcatgtactcaaca

SEQ ID NO: 4230 - DNA, 18 bp, Artificial Sequence
  Synthetic oligonucleotide
acagtcatgtactcaaca

SEQ ID NO: 4231 - DNA, 18 bp, Artificial Sequence
  Synthetic oligonucleotide
acagtcatgtactcaaca

SEQ ID NO: 4232 - DNA, 18 bp, Artificial Sequence
  Synthetic oligonucleotide
acagtcatgtactcaaca

SEQ ID NO: 4233 - DNA, 18 bp, Artificial Sequence
  Synthetic oligonucleotide
acagtcatgtactcaaca

SEQ ID NO: 4234 - DNA, 18 bp, Artificial Sequence
  Synthetic oligonucleotide
acagtcatgtactcaaca

SEQ ID NO: 4235 - DNA, 18 bp, Artificial Sequence
  Synthetic oligonucleotide
acagtcatgtactcaaca

SEQ ID NO: 4236 - DNA, 18 bp, Artificial Sequence
  Synthetic oligonucleotide
acagtcatgtactcaaca

SEQ ID NO: 4237 - DNA, 18 bp, Artificial Sequence
  Synthetic oligonucleotide
acagtcatgtactcaaca

SEQ ID NO: 4238 - DNA, 18 bp, Artificial Sequence
  Synthetic oligonucleotide
acagtcatgtactcaaca

SEQ ID NO: 4239 - DNA, 18 bp, Artificial Sequence
  Synthetic oligonucleotide
acagtcatgtactcaaca

SEQ ID NO: 4240 - DNA, 18 bp, Artificial Sequence
  Synthetic oligonucleotide
acagtcatgtactcaaca

SEQ ID NO: 4241 - DNA, 18 bp, Artificial Sequence
  Synthetic oligonucleotide
acagtcatgtactcaaca

SEQ ID NO: 4242 - DNA, 18 bp, Artificial Sequence
  Synthetic oligonucleotide
acagtcatgtactcaaca

SEQ ID NO: 4243 - DNA, 18 bp, Artificial Sequence
  Synthetic oligonucleotide
acagtcatgtactcaaca

SEQ ID NO: 4244 - DNA, 18 bp, Artificial Sequence
  Synthetic oligonucleotide
acagtcatgtactcaaca

SEQ ID NO: 4245 - DNA, 18 bp, Artificial Sequence
  Synthetic oligonucleotide
acagtcatgtactcaaca

SEQ ID NO: 4246 - DNA, 18 bp, Artificial Sequence
  Synthetic oligonucleotide
acagtcatgtactcaaca

SEQ ID NO: 4247 - DNA, 18 bp, Artificial Sequence
  Synthetic oligonucleotide
acagtcatgtactcaaca

SEQ ID NO: 4248 - DNA, 18 bp, Artificial Sequence
  Synthetic oligonucleotide
acagtcatgtactcaaca

SEQ ID NO: 4249 - DNA, 18 bp, Artificial Sequence
  Synthetic oligonucleotide
acagtcatgtactcaaca

SEQ ID NO: 4250 - DNA, 18 bp, Artificial Sequence
  Synthetic oligonucleotide
acagtcatgtactcaaca

SEQ ID NO: 4251 - DNA, 18 bp, Artificial Sequence
  Synthetic oligonucleotide
acagtcatgtactcaaca

SEQ ID NO: 4252 - DNA, 18 bp, Artificial Sequence
  Synthetic oligonucleotide
acagtcatgtactcaaca

SEQ ID NO: 4253 - DNA, 18 bp, Artificial Sequence
  Synthetic oligonucleotide
acagtcatgtactcaaca

SEQ ID NO: 4254 - DNA, 18 bp, Artificial Sequence
  Synthetic oligonucleotide
acagtcatgtactcaaca

SEQ ID NO: 4255 - DNA, 18 bp, Artificial Sequence
  Synthetic oligonucleotide
acagtcatgtactcaaca

SEQ ID NO: 4256 - DNA, 18 bp, Artificial Sequence
  Synthetic oligonucleotide
acagtcatgtactcaaca

SEQ ID NO: 4257 - DNA, 18 bp, Artificial Sequence
  Synthetic oligonucleotide
acagtcatgtactcaaca

SEQ ID NO: 4258 - DNA, 18 bp, Artificial Sequence
  Synthetic oligonucleotide
acagtcatgtactcaaca

SEQ ID NO: 4259 - DNA, 18 bp, Artificial Sequence
  Synthetic oligonucleotide
acagtcatgtactcaaca

SEQ ID NO: 4260 - DNA, 18 bp, Artificial Sequence
  Synthetic oligonucleotide
acagtcatgtactcaaca

SEQ ID NO: 4261 - DNA, 18 bp, Artificial Sequence
  Synthetic oligonucleotide
acagtcatgtactcaaca

SEQ ID NO: 4262 - DNA, 18 bp, Artificial Sequence
  Synthetic oligonucleotide
acagtcatgtactcaaca

SEQ ID NO: 4263 - DNA, 18 bp, Artificial Sequence
  Synthetic oligonucleotide
acagtcatgtactcaaca

SEQ ID NO: 4264 - DNA, 18 bp, Artificial Sequence
  Synthetic oligonucleotide
acagtcatgtactcaaca

SEQ ID NO: 4265 - DNA, 18 bp, Artificial Sequence
  Synthetic oligonucleotide
acagtcatgtactcaaca

SEQ ID NO: 4266 - DNA, 18 bp, Artificial Sequence
  Synthetic oligonucleotide
acagtcatgtactcaaca

SEQ ID NO: 4267 - DNA, 18 bp, Artificial Sequence
  Synthetic oligonucleotide
acagtcatgtactcaaca

SEQ ID NO: 4268 - DNA, 18 bp, Artificial Sequence
  Synthetic oligonucleotide
acagtcatgtactcaaca

SEQ ID NO: 4269 - DNA, 18 bp, Artificial Sequence
  Synthetic oligonucleotide
acagtcatgtactcaaca

SEQ ID NO: 4270 - DNA, 18 bp, Artificial Sequence
  Synthetic oligonucleotide
acagtcatgtactcaaca

SEQ ID NO: 4271 - DNA, 18 bp, Artificial Sequence
  Synthetic oligonucleotide
acagtcatgtactcaaca

SEQ ID NO: 4272 - DNA, 18 bp, Artificial Sequence
  Synthetic oligonucleotide
acagtcatgtactcaaca

SEQ ID NO: 4273 - DNA, 18 bp, Artificial Sequence
  Synthetic oligonucleotide
acagtcatgtactcaaca

SEQ ID NO: 4274 - DNA, 18 bp, Artificial Sequence
  Synthetic oligonucleotide
acagtcatgtactcaaca

SEQ ID NO: 4275 - DNA, 18 bp, Artificial Sequence
  Synthetic oligonucleotide
acagtcatgtactcaaca

SEQ ID NO: 4276 - DNA, 18 bp, Artificial Sequence
  Synthetic oligonucleotide
acagtcatgtactcaaca

SEQ ID NO: 4277 - DNA, 18 bp, Artificial Sequence
  Synthetic oligonucleotide
acagtcatgtactcaaca

SEQ ID NO: 4278 - DNA, 18 bp, Artificial Sequence
  Synthetic oligonucleotide
acagtcatgtactcaaca

SEQ ID NO: 4279 - DNA, 18 bp, Artificial Sequence
  Synthetic oligonucleotide
acagtcatgtactcaaca

SEQ ID NO: 4280 - DNA, 18 bp, Artificial Sequence
  Synthetic oligonucleotide
acagtcatgtactcaaca

SEQ ID NO: 4281 - DNA, 18 bp, Artificial Sequence
  Synthetic oligonucleotide
acagtcatgtactcaaca

SEQ ID NO: 4282 - DNA, 18 bp, Artificial Sequence
  Synthetic oligonucleotide
acagtcatgtactcaaca

SEQ ID NO: 4283 - DNA, 18 bp, Artificial Sequence
  Synthetic oligonucleotide
acagtcatgtactcaaca

SEQ ID NO: 4284 - DNA, 18 bp, Artificial Sequence
  Synthetic oligonucleotide
acagtcatgtactcaaca

SEQ ID NO: 4285 - DNA, 18 bp, Artificial Sequence
  Synthetic oligonucleotide
acagtcatgtactcaaca

SEQ ID NO: 4286 - DNA, 18 bp, Artificial Sequence
  Synthetic oligonucleotide
acagtcatgtactcaaca

SEQ ID NO: 4287 - DNA, 18 bp, Artificial Sequence
  Synthetic oligonucleotide
acagtcatgtactcaaca

SEQ ID NO: 4288 - DNA, 18 bp, Artificial Sequence
  Synthetic oligonucleotide
acagtcatgtactcaaca

SEQ ID NO: 4289 - DNA, 18 bp, Artificial Sequence
  Synthetic oligonucleotide
acagtcatgtactcaaca

SEQ ID NO: 4290 - DNA, 18 bp, Artificial Sequence
  Synthetic oligonucleotide
acagtcatgtactcaaca

SEQ ID NO: 4291 - DNA, 18 bp, Artificial Sequence
  Synthetic oligonucleotide
acagtcatgtactcaaca

SEQ ID NO: 4292 - DNA, 18 bp, Artificial Sequence
  Synthetic oligonucleotide
acagtcatgtactcaaca

SEQ ID NO: 4293 - DNA, 18 bp, Artificial Sequence
  Synthetic oligonucleotide
acagtcatgtactcaaca

SEQ ID NO: 4294 - DNA, 18 bp, Artificial Sequence
  Synthetic oligonucleotide
acagtcatgtactcaaca

SEQ ID NO: 4295 - DNA, 18 bp, Artificial Sequence
  Synthetic oligonucleotide
acagtcatgtactcaaca

SEQ ID NO: 4296 - DNA, 18 bp, Artificial Sequence
  Synthetic oligonucleotide
acagtcatgtactcaaca

SEQ ID NO: 4297 - DNA, 18 bp, Artificial Sequence
  Synthetic oligonucleotide
acagtcatgtactcaaca

SEQ ID NO: 4298 - DNA, 18 bp, Artificial Sequence
  Synthetic oligonucleotide
acagtcatgtactcaaca

SEQ ID NO: 4299 - DNA, 18 bp, Artificial Sequence
  Synthetic oligonucleotide
acagtcatgtactcaaca

SEQ ID NO: 4300 - DNA, 18 bp, Artificial Sequence
  Synthetic oligonucleotide
acagtcatgtactcaaca

SEQ ID NO: 4301 - DNA, 18 bp, Artificial Sequence
  Synthetic oligonucleotide
acagtcatgtactcaaca

SEQ ID NO: 4302 - DNA, 18 bp, Artificial Sequence
  Synthetic oligonucleotide
acagtcatgtactcaaca

SEQ ID NO: 4303 - DNA, 18 bp, Artificial Sequence
  Synthetic oligonucleotide
acagtcatgtactcaaca

SEQ ID NO: 4304 - DNA, 18 bp, Artificial Sequence
  Synthetic oligonucleotide
acagtcatgtactcaaca

SEQ ID NO: 4305 - DNA, 18 bp, Artificial Sequence
  Synthetic oligonucleotide
acagtcatgtactcaaca

SEQ ID NO: 4306 - DNA, 18 bp, Artificial Sequence
  Synthetic oligonucleotide
acagtcatgtactcaaca

SEQ ID NO: 4307 - DNA, 18 bp, Artificial Sequence
  Synthetic oligonucleotide
acagtcatgtactcaaca

SEQ ID NO: 4308 - DNA, 18 bp, Artificial Sequence
  Synthetic oligonucleotide
acagtcatgtactcaaca

SEQ ID NO: 4309 - DNA, 18 bp, Artificial Sequence
  Synthetic oligonucleotide
acagtcatgtactcaaca

SEQ ID NO: 4310 - DNA, 18 bp, Artificial Sequence
  Synthetic oligonucleotide
acagtcatgtactcaaca

SEQ ID NO: 4311 - DNA, 18 bp, Artificial Sequence
  Synthetic oligonucleotide
acagtcatgtactcaaca

SEQ ID NO: 4312 - DNA, 18 bp, Artificial Sequence
  Synthetic oligonucleotide
acagtcatgtactcaaca

SEQ ID NO: 4313 - DNA, 18 bp, Artificial Sequence
  Synthetic oligonucleotide
acagtcatgtactcaaca

SEQ ID NO: 4314 - DNA, 18 bp, Artificial Sequence
  Synthetic oligonucleotide
acagtcatgtactcaaca

SEQ ID NO: 4315 - DNA, 18 bp, Artificial Sequence
  Synthetic oligonucleotide
acagtcatgtactcaaca

SEQ ID NO: 4316 - DNA, 18 bp, Artificial Sequence
  Synthetic oligonucleotide
acagtcatgtactcaaca

SEQ ID NO: 4317 - DNA, 18 bp, Artificial Sequence
  Synthetic oligonucleotide
acagtcatgtactcaaca

SEQ ID NO: 4318 - DNA, 18 bp, Artificial Sequence
  Synthetic oligonucleotide
acagtcatgtactcaaca

SEQ ID NO: 4319 - DNA, 18 bp, Artificial Sequence
  Synthetic oligonucleotide
acagtcatgtactcaaca

SEQ ID NO: 4320 - DNA, 18 bp, Artificial Sequence
  Synthetic oligonucleotide
acagtcatgtactcaaca

SEQ ID NO: 4321 - DNA, 18 bp, Artificial Sequence
  Synthetic oligonucleotide
acagtcatgtactcaaca

SEQ ID NO: 4322 - DNA, 18 bp, Artificial Sequence
  Synthetic oligonucleotide
acagtcatgtactcaaca

SEQ ID NO: 4323 - DNA, 18 bp, Artificial Sequence
  Synthetic oligonucleotide
acagtcatgtactcaaca

SEQ ID NO: 4324 - DNA, 18 bp, Artificial Sequence
  Synthetic oligonucleotide
cagctacagttgtgatga

SEQ ID NO: 4325 - DNA, 18 bp, Artificial Sequence
  Synthetic oligonucleotide
cagctacagttgtgatga

SEQ ID NO: 4326 - DNA, 18 bp, Artificial Sequence
  Synthetic oligonucleotide
cagctacagttgtgatga

SEQ ID NO: 4327 - DNA, 20 bp, Artificial Sequence
  Synthetic oligonucleotide
ttgaaatattctggttctag

SEQ ID NO: 4328 - DNA, 17 bp, Artificial Sequence
  Synthetic oligonucleotide
ttacaaggtttgctacc

SEQ ID NO: 4329 - DNA, 12 bp, Artificial Sequence
  Synthetic oligonucleotide
cgacgagaatta

SEQ ID NO: 4330 - DNA, 12 bp, Artificial Sequence
  Synthetic oligonucleotide
cgacgagaatta

SEQ ID NO: 4331 - DNA, 18 bp, Artificial Sequence
  Synthetic oligonucleotide
caatggttctaaagccga

SEQ ID NO: 4332 - DNA, 18 bp, Artificial Sequence
  Synthetic oligonucleotide
agggtttttcggctttag

SEQ ID NO: 4333 - DNA, 18 bp, Artificial Sequence
  Synthetic oligonucleotide
agggtttttcggctttag

SEQ ID NO: 4334 - DNA, 18 bp, Artificial Sequence
  Synthetic oligonucleotide
agggtttttcggctttag

SEQ ID NO: 4335 - DNA, 18 bp, Artificial Sequence
  Synthetic oligonucleotide
agggtttttcggctttag

SEQ ID NO: 4336 - DNA, 18 bp, Artificial Sequence
  Synthetic oligonucleotide
cagtagtgtcagcaatgt

SEQ ID NO: 4337 - DNA, 17 bp, Artificial Sequence
  Synthetic oligonucleotide
agtagtgtcagcaatgt

SEQ ID NO: 4338 - DNA, 13 bp, Artificial Sequence
  Synthetic oligonucleotide
agtgtcagcaatg

SEQ ID NO: 4339 - DNA, 17 bp, Artificial Sequence
  Synthetic oligonucleotide
cagagacattgctgaca

SEQ ID NO: 4340 - DNA, 16 bp, Artificial Sequence
  Synthetic oligonucleotide
acattgctgacactac

SEQ ID NO: 4341 - DNA, 16 bp, Artificial Sequence
  Synthetic oligonucleotide
acattgctgacactac

SEQ ID NO: 4342 - DNA, 16 bp, Artificial Sequence
  Synthetic oligonucleotide
acattgctgacactac

SEQ ID NO: 4343 - DNA, 16 bp, Artificial Sequence
  Synthetic oligonucleotide
acattgctgacactac

SEQ ID NO: 4344 - DNA, 16 bp, Artificial Sequence
  Synthetic oligonucleotide
acattgctgacactac

SEQ ID NO: 4345 - DNA, 16 bp, Artificial Sequence
  Synthetic oligonucleotide
acattgctgacactac

SEQ ID NO: 4346 - DNA, 16 bp, Artificial Sequence
  Synthetic oligonucleotide
acattgctgacactac

SEQ ID NO: 4347 - DNA, 16 bp, Artificial Sequence
  Synthetic oligonucleotide
acattgctgacactac

SEQ ID NO: 4348 - DNA, 16 bp, Artificial Sequence
  Synthetic oligonucleotide
acattgctgacactac

SEQ ID NO: 4349 - DNA, 16 bp, Artificial Sequence
  Synthetic oligonucleotide
acattgctgacactac

SEQ ID NO: 4350 - DNA, 16 bp, Artificial Sequence
  Synthetic oligonucleotide
acattgctgacactac

SEQ ID NO: 4351 - DNA, 16 bp, Artificial Sequence
  Synthetic oligonucleotide
acattgctgacactac

SEQ ID NO: 4352 - DNA, 16 bp, Artificial Sequence
  Synthetic oligonucleotide
acattgctgacactac

SEQ ID NO: 4353 - DNA, 16 bp, Artificial Sequence
  Synthetic oligonucleotide
acattgctgacactac

SEQ ID NO: 4354 - DNA, 16 bp, Artificial Sequence
  Synthetic oligonucleotide
acattgctgacactac

SEQ ID NO: 4355 - DNA, 16 bp, Artificial Sequence
  Synthetic oligonucleotide
acattgctgacactac

SEQ ID NO: 4356 - DNA, 16 bp, Artificial Sequence
  Synthetic oligonucleotide
acattgctgacactac

SEQ ID NO: 4357 - DNA, 16 bp, Artificial Sequence
  Synthetic oligonucleotide
acattgctgacactac

SEQ ID NO: 4358 - DNA, 16 bp, Artificial Sequence
  Synthetic oligonucleotide
acattgctgacactac

SEQ ID NO: 4359 - DNA, 16 bp, Artificial Sequence
  Synthetic oligonucleotide
acattgctgacactac

SEQ ID NO: 4360 - DNA, 16 bp, Artificial Sequence
  Synthetic oligonucleotide
acattgctgacactac

SEQ ID NO: 4361 - DNA, 16 bp, Artificial Sequence
  Synthetic oligonucleotide
acattgctgacactac

SEQ ID NO: 4362 - DNA, 16 bp, Artificial Sequence
  Synthetic oligonucleotide
acattgctgacactac

SEQ ID NO: 4363 - DNA, 16 bp, Artificial Sequence
  Synthetic oligonucleotide
acattgctgacactac

SEQ ID NO: 4364 - DNA, 16 bp, Artificial Sequence
  Synthetic oligonucleotide
acattgctgacactac

SEQ ID NO: 4365 - DNA, 16 bp, Artificial Sequence
  Synthetic oligonucleotide
acattgctgacactac

SEQ ID NO: 4366 - DNA, 16 bp, Artificial Sequence
  Synthetic oligonucleotide
acattgctgacactac

SEQ ID NO: 4367 - DNA, 16 bp, Artificial Sequence
  Synthetic oligonucleotide
acattgctgacactac

SEQ ID NO: 4368 - DNA, 16 bp, Artificial Sequence
  Synthetic oligonucleotide
acattgctgacactac

SEQ ID NO: 4369 - DNA, 16 bp, Artificial Sequence
  Synthetic oligonucleotide
acattgctgacactac

SEQ ID NO: 4370 - DNA, 16 bp, Artificial Sequence
  Synthetic oligonucleotide
acattgctgacactac

SEQ ID NO: 4371 - DNA, 16 bp, Artificial Sequence
  Synthetic oligonucleotide
acattgctgacactac

SEQ ID NO: 4372 - DNA, 16 bp, Artificial Sequence
  Synthetic oligonucleotide
acattgctgacactac

SEQ ID NO: 4373 - DNA, 16 bp, Artificial Sequence
  Synthetic oligonucleotide
acattgctgacactac

SEQ ID NO: 4374 - DNA, 16 bp, Artificial Sequence
  Synthetic oligonucleotide
acattgctgacactac

SEQ ID NO: 4375 - DNA, 16 bp, Artificial Sequence
  Synthetic oligonucleotide
acattgctgacactac

SEQ ID NO: 4376 - DNA, 16 bp, Artificial Sequence
  Synthetic oligonucleotide
acattgctgacactac

SEQ ID NO: 4377 - DNA, 16 bp, Artificial Sequence
  Synthetic oligonucleotide
acattgctgacactac

SEQ ID NO: 4378 - DNA, 16 bp, Artificial Sequence
  Synthetic oligonucleotide
acattgctgacactac

SEQ ID NO: 4379 - DNA, 16 bp, Artificial Sequence
  Synthetic oligonucleotide
acattgctgacactac

SEQ ID NO: 4380 - DNA, 16 bp, Artificial Sequence
  Synthetic oligonucleotide
acattgctgacactac

SEQ ID NO: 4381 - DNA, 18 bp, Artificial Sequence
  Synthetic oligonucleotide
tggattgactagctacac

SEQ ID NO: 4382 - DNA, 20 bp, Artificial Sequence
  Synthetic oligonucleotide
actgaattttctgcaccaag

SEQ ID NO: 4383 - DNA, 19 bp, Artificial Sequence
  Synthetic oligonucleotide
actgaattttctgcaccaa

SEQ ID NO: 4384 - DNA, 18 bp, Artificial Sequence
  Synthetic oligonucleotide
ctgaattttctgcaccaa

SEQ ID NO: 4385 - DNA, 13 bp, Artificial Sequence
  Synthetic oligonucleotide
ttggtgcagaaaa

SEQ ID NO: 4386 - DNA, 14 bp, Artificial Sequence
  Synthetic oligonucleotide
cttggtgcagaaaa

SEQ ID NO: 4387 - DNA, 15 bp, Artificial Sequence
  Synthetic oligonucleotide
acttggtgcagaaaa

SEQ ID NO: 4388 - DNA, 15 bp, Artificial Sequence
  Synthetic oligonucleotide
acttggtgcagaaaa

SEQ ID NO: 4389 - DNA, 15 bp, Artificial Sequence
  Synthetic oligonucleotide
acttggtgcagaaaa

SEQ ID NO: 4390 - DNA, 15 bp, Artificial Sequence
  Synthetic oligonucleotide
acttggtgcagaaaa

SEQ ID NO: 4391 - DNA, 15 bp, Artificial Sequence
  Synthetic oligonucleotide
acttggtgcagaaaa

SEQ ID NO: 4392 - DNA, 15 bp, Artificial Sequence
  Synthetic oligonucleotide
acttggtgcagaaaa

SEQ ID NO: 4393 - DNA, 15 bp, Artificial Sequence
  Synthetic oligonucleotide
acttggtgcagaaaa

SEQ ID NO: 4394 - DNA, 18 bp, Artificial Sequence
  Synthetic oligonucleotide
atgctatacatgtctctg

SEQ ID NO: 4395 - DNA, 17 bp, Artificial Sequence
  Synthetic oligonucleotide
cccagagacatgtatag

SEQ ID NO: 4396 - DNA, 22 bp, Artificial Sequence
  Synthetic oligonucleotide
cttgctttacatagaagttatt

SEQ ID NO: 4397 - DNA, 21 bp, Artificial Sequence
  Synthetic oligonucleotide
aatcattactacagacaacac

SEQ ID NO: 4398 - DNA, 17 bp, Artificial Sequence
  Synthetic oligonucleotide
cattactacagacaaca

SEQ ID NO: 4399 - DNA, 16 bp, Artificial Sequence
  Synthetic oligonucleotide
cattactacagacaac

SEQ ID NO: 4400 - DNA, 17 bp, Artificial Sequence
  Synthetic oligonucleotide
aaatgtgttgtctgtag

SEQ ID NO: 4401 - DNA, 16 bp, Artificial Sequence
  Synthetic oligonucleotide
attactacagacaaca

SEQ ID NO: 4402 - DNA, 17 bp, Artificial Sequence
  Synthetic oligonucleotide
tagtgcgtgatctccct

SEQ ID NO: 4403 - DNA, 15 bp, Artificial Sequence
  Synthetic oligonucleotide
tgcgtgatctccctc

SEQ ID NO: 4404 - DNA, 15 bp, Artificial Sequence
  Synthetic oligonucleotide
tgagggagatcacgc

SEQ ID NO: 4405 - DNA, 13 bp, Artificial Sequence
  Synthetic oligonucleotide
tgcgtgatctccc

SEQ ID NO: 4406 - DNA, 15 bp, Artificial Sequence
  Synthetic oligonucleotide
tagtgcgtgatctcc

SEQ ID NO: 4407 - DNA, 17 bp, Artificial Sequence
  Synthetic oligonucleotide
ctgaagaagaatcacca

SEQ ID NO: 4408 - DNA, 17 bp, Artificial Sequence
  Synthetic oligonucleotide
ctgaagaagaatcacca

SEQ ID NO: 4409 - DNA, 17 bp, Artificial Sequence
  Synthetic oligonucleotide
ctgaagaagaatcacca

SEQ ID NO: 4410 - DNA, 18 bp, Artificial Sequence
  Synthetic oligonucleotide
ctttatcaggatgttaac

SEQ ID NO: 4411 - DNA, 18 bp, Artificial Sequence
  Synthetic oligonucleotide
ctttatcaggatgttaac

SEQ ID NO: 4412 - DNA, 24 bp, Artificial Sequence
  Synthetic oligonucleotide
acttcctaaacaatctatacaggt

SEQ ID NO: 4413 - DNA, 17 bp, Artificial Sequence
  Synthetic oligonucleotide
atgcttcagttgtaaac

SEQ ID NO: 4414 - DNA, 18 bp, Artificial Sequence
  Synthetic oligonucleotide
atcaggatgttaactgca

SEQ ID NO: 4415 - DNA, 18 bp, Artificial Sequence
  Synthetic oligonucleotide
atcaggatgttaactgca

SEQ ID NO: 4416 - DNA, 18 bp, Artificial Sequence
  Synthetic oligonucleotide
atcaggatgttaactgca

SEQ ID NO: 4417 - DNA, 18 bp, Artificial Sequence
  Synthetic oligonucleotide
atcaggatgttaactgca

SEQ ID NO: 4418 - DNA, 18 bp, Artificial Sequence
  Synthetic oligonucleotide
atcaggatgttaactgca

SEQ ID NO: 4419 - DNA, 18 bp, Artificial Sequence
  Synthetic oligonucleotide
atcaggatgttaactgca

SEQ ID NO: 4420 - DNA, 18 bp, Artificial Sequence
  Synthetic oligonucleotide
atcaggatgttaactgca

SEQ ID NO: 4421 - DNA, 18 bp, Artificial Sequence
  Synthetic oligonucleotide
atcaggatgttaactgca

SEQ ID NO: 4422 - DNA, 18 bp, Artificial Sequence
  Synthetic oligonucleotide
atcaggatgttaactgca

SEQ ID NO: 4423 - DNA, 18 bp, Artificial Sequence
  Synthetic oligonucleotide
atcaggatgttaactgca

SEQ ID NO: 4424 - DNA, 18 bp, Artificial Sequence
  Synthetic oligonucleotide
atcaggatgttaactgca

SEQ ID NO: 4425 - DNA, 18 bp, Artificial Sequence
  Synthetic oligonucleotide
atcaggatgttaactgca

SEQ ID NO: 4426 - DNA, 18 bp, Artificial Sequence
  Synthetic oligonucleotide
atcaggatgttaactgca

SEQ ID NO: 4427 - DNA, 18 bp, Artificial Sequence
  Synthetic oligonucleotide
atcaggatgttaactgca

SEQ ID NO: 4428 - DNA, 18 bp, Artificial Sequence
  Synthetic oligonucleotide
atcaggatgttaactgca

SEQ ID NO: 4429 - DNA, 18 bp, Artificial Sequence
  Synthetic oligonucleotide
atcaggatgttaactgca

SEQ ID NO: 4430 - DNA, 18 bp, Artificial Sequence
  Synthetic oligonucleotide
atcaggatgttaactgca

SEQ ID NO: 4431 - DNA, 18 bp, Artificial Sequence
  Synthetic oligonucleotide
atcaggatgttaactgca

SEQ ID NO: 4432 - DNA, 18 bp, Artificial Sequence
  Synthetic oligonucleotide
atcaggatgttaactgca

SEQ ID NO: 4433 - DNA, 18 bp, Artificial Sequence
  Synthetic oligonucleotide
atcaggatgttaactgca

SEQ ID NO: 4434 - DNA, 18 bp, Artificial Sequence
  Synthetic oligonucleotide
atcaggatgttaactgca

SEQ ID NO: 4435 - DNA, 18 bp, Artificial Sequence
  Synthetic oligonucleotide
atcaggatgttaactgca

SEQ ID NO: 4436 - DNA, 18 bp, Artificial Sequence
  Synthetic oligonucleotide
atcaggatgttaactgca

SEQ ID NO: 4437 - DNA, 18 bp, Artificial Sequence
  Synthetic oligonucleotide
atcaggatgttaactgca

SEQ ID NO: 4438 - DNA, 18 bp, Artificial Sequence
  Synthetic oligonucleotide
atcaggatgttaactgca

SEQ ID NO: 4439 - DNA, 18 bp, Artificial Sequence
  Synthetic oligonucleotide
atcaggatgttaactgca

SEQ ID NO: 4440 - DNA, 18 bp, Artificial Sequence
  Synthetic oligonucleotide
atcaggatgttaactgca

SEQ ID NO: 4441 - DNA, 16 bp, Artificial Sequence
  Synthetic oligonucleotide
ccaattaaagattttg

SEQ ID NO: 4442 - DNA, 16 bp, Artificial Sequence
  Synthetic oligonucleotide
ccaattaaagattttg

SEQ ID NO: 4443 - DNA, 18 bp, Artificial Sequence
  Synthetic oligonucleotide
caccaattaaagattttg

SEQ ID NO: 4444 - DNA, 18 bp, Artificial Sequence
  Synthetic oligonucleotide
taggacagggttatcaaa

SEQ ID NO: 4445 - DNA, 18 bp, Artificial Sequence
  Synthetic oligonucleotide
aagaggtttgataaccct

SEQ ID NO: 4446 - DNA, 14 bp, Artificial Sequence
  Synthetic oligonucleotide
agggttagcaaacc

SEQ ID NO: 4447 - DNA, 14 bp, Artificial Sequence
  Synthetic oligonucleotide
aggtttgataaccc

SEQ ID NO: 4448 - DNA, 16 bp, Artificial Sequence
  Synthetic oligonucleotide
aagaggtttgataacc

SEQ ID NO: 4449 - DNA, 16 bp, Artificial Sequence
  Synthetic oligonucleotide
aagaggtttgataacc

SEQ ID NO: 4450 - DNA, 16 bp, Artificial Sequence
  Synthetic oligonucleotide
aagaggtttgataacc

SEQ ID NO: 4451 - DNA, 16 bp, Artificial Sequence
  Synthetic oligonucleotide
aagaggtttgataacc

SEQ ID NO: 4452 - DNA, 16 bp, Artificial Sequence
  Synthetic oligonucleotide
aagaggtttgataacc

SEQ ID NO: 4453 - DNA, 16 bp, Artificial Sequence
  Synthetic oligonucleotide
aagaggtttgataacc

SEQ ID NO: 4454 - DNA, 16 bp, Artificial Sequence
  Synthetic oligonucleotide
aagaggtttgataacc

SEQ ID NO: 4455 - DNA, 16 bp, Artificial Sequence
  Synthetic oligonucleotide
aagaggtttgataacc

SEQ ID NO: 4456 - DNA, 16 bp, Artificial Sequence
  Synthetic oligonucleotide
aagaggtttgataacc

SEQ ID NO: 4457 - DNA, 16 bp, Artificial Sequence
  Synthetic oligonucleotide
aagaggtttgataacc

SEQ ID NO: 4458 - DNA, 16 bp, Artificial Sequence
  Synthetic oligonucleotide
aagaggtttgataacc

SEQ ID NO: 4459 - DNA, 16 bp, Artificial Sequence
  Synthetic oligonucleotide
aagaggtttgataacc

SEQ ID NO: 4460 - DNA, 16 bp, Artificial Sequence
  Synthetic oligonucleotide
aagaggtttgataacc

SEQ ID NO: 4461 - DNA, 16 bp, Artificial Sequence
  Synthetic oligonucleotide
aagaggtttgataacc

SEQ ID NO: 4462 - DNA, 16 bp, Artificial Sequence
  Synthetic oligonucleotide
aagaggtttgataacc

SEQ ID NO: 4463 - DNA, 16 bp, Artificial Sequence
  Synthetic oligonucleotide
aagaggtttgataacc

SEQ ID NO: 4464 - DNA, 16 bp, Artificial Sequence
  Synthetic oligonucleotide
aagaggtttgataacc

SEQ ID NO: 4465 - DNA, 16 bp, Artificial Sequence
  Synthetic oligonucleotide
aagaggtttgataacc

SEQ ID NO: 4466 - DNA, 16 bp, Artificial Sequence
  Synthetic oligonucleotide
aagaggtttgataacc

SEQ ID NO: 4467 - DNA, 16 bp, Artificial Sequence
  Synthetic oligonucleotide
aagaggtttgataacc

SEQ ID NO: 4468 - DNA, 16 bp, Artificial Sequence
  Synthetic oligonucleotide
aagaggtttgataacc

SEQ ID NO: 4469 - DNA, 16 bp, Artificial Sequence
  Synthetic oligonucleotide
aagaggtttgataacc

SEQ ID NO: 4470 - DNA, 16 bp, Artificial Sequence
  Synthetic oligonucleotide
aagaggtttgataacc

SEQ ID NO: 4471 - DNA, 16 bp, Artificial Sequence
  Synthetic oligonucleotide
aagaggtttgataacc

SEQ ID NO: 4472 - DNA, 16 bp, Artificial Sequence
  Synthetic oligonucleotide
aagaggtttgataacc

SEQ ID NO: 4473 - DNA, 16 bp, Artificial Sequence
  Synthetic oligonucleotide
aagaggtttgataacc

SEQ ID NO: 4474 - DNA, 16 bp, Artificial Sequence
  Synthetic oligonucleotide
aagaggtttgataacc

SEQ ID NO: 4475 - DNA, 16 bp, Artificial Sequence
  Synthetic oligonucleotide
aagaggtttgataacc

SEQ ID NO: 4476 - DNA, 16 bp, Artificial Sequence
  Synthetic oligonucleotide
aagaggtttgataacc

SEQ ID NO: 4477 - DNA, 16 bp, Artificial Sequence
  Synthetic oligonucleotide
aagaggtttgataacc

SEQ ID NO: 4478 - DNA, 16 bp, Artificial Sequence
  Synthetic oligonucleotide
aagaggtttgataacc

SEQ ID NO: 4479 - DNA, 16 bp, Artificial Sequence
  Synthetic oligonucleotide
aagaggtttgataacc

SEQ ID NO: 4480 - DNA, 16 bp, Artificial Sequence
  Synthetic oligonucleotide
aagaggtttgataacc

SEQ ID NO: 4481 - DNA, 16 bp, Artificial Sequence
  Synthetic oligonucleotide
aagaggtttgataacc

SEQ ID NO: 4482 - DNA, 16 bp, Artificial Sequence
  Synthetic oligonucleotide
aagaggtttgataacc

SEQ ID NO: 4483 - DNA, 16 bp, Artificial Sequence
  Synthetic oligonucleotide
aagaggtttgataacc

SEQ ID NO: 4484 - DNA, 16 bp, Artificial Sequence
  Synthetic oligonucleotide
aagaggtttgataacc

SEQ ID NO: 4485 - DNA, 16 bp, Artificial Sequence
  Synthetic oligonucleotide
aagaggtttgataacc

SEQ ID NO: 4486 - DNA, 16 bp, Artificial Sequence
  Synthetic oligonucleotide
aagaggtttgataacc

SEQ ID NO: 4487 - DNA, 16 bp, Artificial Sequence
  Synthetic oligonucleotide
aagaggtttgataacc

SEQ ID NO: 4488 - DNA, 16 bp, Artificial Sequence
  Synthetic oligonucleotide
aagaggtttgataacc

SEQ ID NO: 4489 - DNA, 16 bp, Artificial Sequence
  Synthetic oligonucleotide
aagaggtttgataacc

SEQ ID NO: 4490 - DNA, 16 bp, Artificial Sequence
  Synthetic oligonucleotide
aagaggtttgataacc

SEQ ID NO: 4491 - DNA, 16 bp, Artificial Sequence
  Synthetic oligonucleotide
aagaggtttgataacc

SEQ ID NO: 4492 - DNA, 16 bp, Artificial Sequence
  Synthetic oligonucleotide
aagaggtttgataacc

SEQ ID NO: 4493 - DNA, 16 bp, Artificial Sequence
  Synthetic oligonucleotide
aagaggtttgataacc

SEQ ID NO: 4494 - DNA, 16 bp, Artificial Sequence
  Synthetic oligonucleotide
aagaggtttgataacc

SEQ ID NO: 4495 - DNA, 16 bp, Artificial Sequence
  Synthetic oligonucleotide
aagaggtttgataacc

SEQ ID NO: 4496 - DNA, 16 bp, Artificial Sequence
  Synthetic oligonucleotide
aagaggtttgataacc

SEQ ID NO: 4497 - DNA, 16 bp, Artificial Sequence
  Synthetic oligonucleotide
aagaggtttgataacc

SEQ ID NO: 4498 - DNA, 16 bp, Artificial Sequence
  Synthetic oligonucleotide
aagaggtttgataacc

SEQ ID NO: 4499 - DNA, 16 bp, Artificial Sequence
  Synthetic oligonucleotide
aagaggtttgataacc

SEQ ID NO: 4500 - DNA, 16 bp, Artificial Sequence
  Synthetic oligonucleotide
aagaggtttgataacc

SEQ ID NO: 4501 - DNA, 16 bp, Artificial Sequence
  Synthetic oligonucleotide
aagaggtttgataacc

SEQ ID NO: 4502 - DNA, 16 bp, Artificial Sequence
  Synthetic oligonucleotide
aagaggtttgataacc

SEQ ID NO: 4503 - DNA, 16 bp, Artificial Sequence
  Synthetic oligonucleotide
aagaggtttgataacc

SEQ ID NO: 4504 - DNA, 16 bp, Artificial Sequence
  Synthetic oligonucleotide
aagaggtttgataacc

SEQ ID NO: 4505 - DNA, 16 bp, Artificial Sequence
  Synthetic oligonucleotide
aagaggtttgataacc

SEQ ID NO: 4506 - DNA, 16 bp, Artificial Sequence
  Synthetic oligonucleotide
aagaggtttgataacc

SEQ ID NO: 4507 - DNA, 16 bp, Artificial Sequence
  Synthetic oligonucleotide
aagaggtttgataacc

SEQ ID NO: 4508 - DNA, 16 bp, Artificial Sequence
  Synthetic oligonucleotide
aagaggtttgataacc

SEQ ID NO: 4509 - DNA, 16 bp, Artificial Sequence
  Synthetic oligonucleotide
aagaggtttgataacc

SEQ ID NO: 4510 - DNA, 16 bp, Artificial Sequence
  Synthetic oligonucleotide
aagaggtttgataacc

SEQ ID NO: 4511 - DNA, 16 bp, Artificial Sequence
  Synthetic oligonucleotide
aagaggtttgataacc

SEQ ID NO: 4512 - DNA, 16 bp, Artificial Sequence
  Synthetic oligonucleotide
aagaggtttgataacc

SEQ ID NO: 4513 - DNA, 16 bp, Artificial Sequence
  Synthetic oligonucleotide
aagaggtttgataacc

SEQ ID NO: 4514 - DNA, 16 bp, Artificial Sequence
  Synthetic oligonucleotide
aagaggtttgataacc

SEQ ID NO: 4515 - DNA, 16 bp, Artificial Sequence
  Synthetic oligonucleotide
aagaggtttgataacc

SEQ ID NO: 4516 - DNA, 16 bp, Artificial Sequence
  Synthetic oligonucleotide
aagaggtttgataacc

SEQ ID NO: 4517 - DNA, 16 bp, Artificial Sequence
  Synthetic oligonucleotide
aagaggtttgataacc

SEQ ID NO: 4518 - DNA, 16 bp, Artificial Sequence
  Synthetic oligonucleotide
aagaggtttgataacc

SEQ ID NO: 4519 - DNA, 16 bp, Artificial Sequence
  Synthetic oligonucleotide
aagaggtttgataacc

SEQ ID NO: 4520 - DNA, 16 bp, Artificial Sequence
  Synthetic oligonucleotide
aagaggtttgataacc

SEQ ID NO: 4521 - DNA, 16 bp, Artificial Sequence
  Synthetic oligonucleotide
aagaggtttgataacc

SEQ ID NO: 4522 - DNA, 16 bp, Artificial Sequence
  Synthetic oligonucleotide
aagaggtttgataacc

SEQ ID NO: 4523 - DNA, 16 bp, Artificial Sequence
  Synthetic oligonucleotide
aagaggtttgataacc

SEQ ID NO: 4524 - DNA, 16 bp, Artificial Sequence
  Synthetic oligonucleotide
aagaggtttgataacc

SEQ ID NO: 4525 - DNA, 16 bp, Artificial Sequence
  Synthetic oligonucleotide
aagaggtttgataacc

SEQ ID NO: 4526 - DNA, 16 bp, Artificial Sequence
  Synthetic oligonucleotide
aagaggtttgataacc

SEQ ID NO: 4527 - DNA, 16 bp, Artificial Sequence
  Synthetic oligonucleotide
aagaggtttgataacc

SEQ ID NO: 4528 - DNA, 16 bp, Artificial Sequence
  Synthetic oligonucleotide
aagaggtttgataacc

SEQ ID NO: 4529 - DNA, 16 bp, Artificial Sequence
  Synthetic oligonucleotide
aagaggtttgataacc

SEQ ID NO: 4530 - DNA, 16 bp, Artificial Sequence
  Synthetic oligonucleotide
aagaggtttgataacc

SEQ ID NO: 4531 - DNA, 16 bp, Artificial Sequence
  Synthetic oligonucleotide
aagaggtttgataacc

SEQ ID NO: 4532 - DNA, 16 bp, Artificial Sequence
  Synthetic oligonucleotide
aagaggtttgataacc

SEQ ID NO: 4533 - DNA, 16 bp, Artificial Sequence
  Synthetic oligonucleotide
aagaggtttgataacc

SEQ ID NO: 4534 - DNA, 16 bp, Artificial Sequence
  Synthetic oligonucleotide
aagaggtttgataacc

SEQ ID NO: 4535 - DNA, 16 bp, Artificial Sequence
  Synthetic oligonucleotide
aagaggtttgataacc

SEQ ID NO: 4536 - DNA, 16 bp, Artificial Sequence
  Synthetic oligonucleotide
aagaggtttgataacc

SEQ ID NO: 4537 - DNA, 16 bp, Artificial Sequence
  Synthetic oligonucleotide
aagaggtttgataacc

SEQ ID NO: 4538 - DNA, 18 bp, Artificial Sequence
  Synthetic oligonucleotide
cattagtgggttggaaac

SEQ ID NO: 4539 - DNA, 15 bp, Artificial Sequence
  Synthetic oligonucleotide
acagggttatcaaac

SEQ ID NO: 4540 - DNA, 15 bp, Artificial Sequence
  Synthetic oligonucleotide
acagggttatcaaac

SEQ ID NO: 4541 - DNA, 18 bp, Artificial Sequence
  Synthetic oligonucleotide
aaacttcaagatgtggtc

SEQ ID NO: 4542 - DNA, 18 bp, Artificial Sequence
  Synthetic oligonucleotide
aaacttcaagatgtggtc

SEQ ID NO: 4543 - DNA, 22 bp, Artificial Sequence
  Synthetic oligonucleotide
cttgctttacatagaagttatt

SEQ ID NO: 4544 - DNA, 18 bp, Artificial Sequence
  Synthetic oligonucleotide
taaagcaagtaaagtttg

SEQ ID NO: 4545 - DNA, 17 bp, Artificial Sequence
  Synthetic oligonucleotide
aaagcaagtaaagtttg

SEQ ID NO: 4546 - DNA, 17 bp, Artificial Sequence
  Synthetic oligonucleotide
aaagcaagtaaagtttg

SEQ ID NO: 4547 - DNA, 17 bp, Artificial Sequence
  Synthetic oligonucleotide
aaagcaagtaaagtttg

SEQ ID NO: 4548 - DNA, 17 bp, Artificial Sequence
  Synthetic oligonucleotide
aaagcaagtaaagtttg

SEQ ID NO: 4549 - DNA, 17 bp, Artificial Sequence
  Synthetic oligonucleotide
aaagcaagtaaagtttg

SEQ ID NO: 4550 - DNA, 17 bp, Artificial Sequence
  Synthetic oligonucleotide
aaagcaagtaaagtttg

SEQ ID NO: 4551 - DNA, 17 bp, Artificial Sequence
  Synthetic oligonucleotide
aaagcaagtaaagtttg

SEQ ID NO: 4552 - DNA, 17 bp, Artificial Sequence
  Synthetic oligonucleotide
aaagcaagtaaagtttg

SEQ ID NO: 4553 - DNA, 17 bp, Artificial Sequence
  Synthetic oligonucleotide
aaagcaagtaaagtttg

SEQ ID NO: 4554 - DNA, 17 bp, Artificial Sequence
  Synthetic oligonucleotide
aaagcaagtaaagtttg

SEQ ID NO: 4555 - DNA, 17 bp, Artificial Sequence
  Synthetic oligonucleotide
aaagcaagtaaagtttg

SEQ ID NO: 4556 - DNA, 17 bp, Artificial Sequence
  Synthetic oligonucleotide
aaagcaagtaaagtttg

SEQ ID NO: 4557 - DNA, 17 bp, Artificial Sequence
  Synthetic oligonucleotide
aaagcaagtaaagtttg

SEQ ID NO: 4558 - DNA, 17 bp, Artificial Sequence
  Synthetic oligonucleotide
aaagcaagtaaagtttg

SEQ ID NO: 4559 - DNA, 17 bp, Artificial Sequence
  Synthetic oligonucleotide
aaagcaagtaaagtttg

SEQ ID NO: 4560 - DNA, 18 bp, Artificial Sequence
  Synthetic oligonucleotide
cccagagacatgtatagc

SEQ ID NO: 4561 - DNA, 18 bp, Artificial Sequence
  Synthetic oligonucleotide
acatgtctctgggaccaa

SEQ ID NO: 4562 - DNA, 18 bp, Artificial Sequence
  Synthetic oligonucleotide
acatgtctctgggaccaa

SEQ ID NO: 4563 - DNA, 17 bp, Artificial Sequence
  Synthetic oligonucleotide
aaagcaagtaaagtttg

SEQ ID NO: 4564 - DNA, 18 bp, Artificial Sequence
  Synthetic oligonucleotide
ttgtggtaataaacaccc

SEQ ID NO: 4565 - DNA, 16 bp, Artificial Sequence
  Synthetic oligonucleotide
tttagtgcgtgatctc

SEQ ID NO: 4566 - DNA, 17 bp, Artificial Sequence
  Synthetic oligonucleotide
aatggtgttgaaggttt

SEQ ID NO: 4567 - DNA, 16 bp, Artificial Sequence
  Synthetic oligonucleotide
aatggtgttgaaggtt

SEQ ID NO: 4568 - DNA, 16 bp, Artificial Sequence
  Synthetic oligonucleotide
aatggtgttgaaggtt

SEQ ID NO: 4569 - DNA, 16 bp, Artificial Sequence
  Synthetic oligonucleotide
aatggtgttgaaggtt

SEQ ID NO: 4570 - DNA, 16 bp, Artificial Sequence
  Synthetic oligonucleotide
aatggtgttgaaggtt

SEQ ID NO: 4571 - DNA, 16 bp, Artificial Sequence
  Synthetic oligonucleotide
aatggtgttgaaggtt

SEQ ID NO: 4572 - DNA, 16 bp, Artificial Sequence
  Synthetic oligonucleotide
aatggtgttgaaggtt

SEQ ID NO: 4573 - DNA, 16 bp, Artificial Sequence
  Synthetic oligonucleotide
aatggtgttgaaggtt

SEQ ID NO: 4574 - DNA, 16 bp, Artificial Sequence
  Synthetic oligonucleotide
aatggtgttgaaggtt

SEQ ID NO: 4575 - DNA, 16 bp, Artificial Sequence
  Synthetic oligonucleotide
aatggtgttgaaggtt

SEQ ID NO: 4576 - DNA, 16 bp, Artificial Sequence
  Synthetic oligonucleotide
aatggtgttgaaggtt

SEQ ID NO: 4577 - DNA, 16 bp, Artificial Sequence
  Synthetic oligonucleotide
aatggtgttgaaggtt

SEQ ID NO: 4578 - DNA, 16 bp, Artificial Sequence
  Synthetic oligonucleotide
aatggtgttgaaggtt

SEQ ID NO: 4579 - DNA, 16 bp, Artificial Sequence
  Synthetic oligonucleotide
aatggtgttgaaggtt

SEQ ID NO: 4580 - DNA, 16 bp, Artificial Sequence
  Synthetic oligonucleotide
aatggtgttgaaggtt

SEQ ID NO: 4581 - DNA, 16 bp, Artificial Sequence
  Synthetic oligonucleotide
aatggtgttgaaggtt

SEQ ID NO: 4582 - DNA, 16 bp, Artificial Sequence
  Synthetic oligonucleotide
aatggtgttgaaggtt

SEQ ID NO: 4583 - DNA, 16 bp, Artificial Sequence
  Synthetic oligonucleotide
aatggtgttgaaggtt

SEQ ID NO: 4584 - DNA, 16 bp, Artificial Sequence
  Synthetic oligonucleotide
aatggtgttgaaggtt

SEQ ID NO: 4585 - DNA, 16 bp, Artificial Sequence
  Synthetic oligonucleotide
aatggtgttgaaggtt

SEQ ID NO: 4586 - DNA, 16 bp, Artificial Sequence
  Synthetic oligonucleotide
aatggtgttgaaggtt

SEQ ID NO: 4587 - DNA, 16 bp, Artificial Sequence
  Synthetic oligonucleotide
aatggtgttgaaggtt

SEQ ID NO: 4588 - DNA, 16 bp, Artificial Sequence
  Synthetic oligonucleotide
aatggtgttgaaggtt

SEQ ID NO: 4589 - DNA, 16 bp, Artificial Sequence
  Synthetic oligonucleotide
aatggtgttgaaggtt

SEQ ID NO: 4590 - DNA, 16 bp, Artificial Sequence
  Synthetic oligonucleotide
aatggtgttgaaggtt

SEQ ID NO: 4591 - DNA, 16 bp, Artificial Sequence
  Synthetic oligonucleotide
aatggtgttgaaggtt

SEQ ID NO: 4592 - DNA, 16 bp, Artificial Sequence
  Synthetic oligonucleotide
aatggtgttgaaggtt

SEQ ID NO: 4593 - DNA, 16 bp, Artificial Sequence
  Synthetic oligonucleotide
aatggtgttgaaggtt

SEQ ID NO: 4594 - DNA, 16 bp, Artificial Sequence
  Synthetic oligonucleotide
aatggtgttgaaggtt

SEQ ID NO: 4595 - DNA, 16 bp, Artificial Sequence
  Synthetic oligonucleotide
aatggtgttgaaggtt

SEQ ID NO: 4596 - DNA, 16 bp, Artificial Sequence
  Synthetic oligonucleotide
atggtgttgaaggttt

SEQ ID NO: 4597 - DNA, 17 bp, Artificial Sequence
  Synthetic oligonucleotide
aatggtgttgaaggttt

SEQ ID NO: 4598 - DNA, 16 bp, Artificial Sequence
  Synthetic oligonucleotide
acacttgagattcttg

SEQ ID NO: 4599 - DNA, 15 bp, Artificial Sequence
  Synthetic oligonucleotide
acacttgagattctt

SEQ ID NO: 4600 - DNA, 16 bp, Artificial Sequence
  Synthetic oligonucleotide
acacttgagattcttg

SEQ ID NO: 4601 - DNA, 15 bp, Artificial Sequence
  Synthetic oligonucleotide
acacttgagattctt

SEQ ID NO: 4602 - DNA, 16 bp, Artificial Sequence
  Synthetic oligonucleotide
acacttgagattcttg

SEQ ID NO: 4603 - DNA, 15 bp, Artificial Sequence
  Synthetic oligonucleotide
cacttgagattcttg

SEQ ID NO: 4604 - DNA, 16 bp, Artificial Sequence
  Synthetic oligonucleotide
acacttgagattcttg

SEQ ID NO: 4605 - DNA, 15 bp, Artificial Sequence
  Synthetic oligonucleotide
cacttgagattcttg

SEQ ID NO: 4606 - DNA, 18 bp, Artificial Sequence
  Synthetic oligonucleotide
actctgaactcactttcc

SEQ ID NO: 4607 - DNA, 16 bp, Artificial Sequence
  Synthetic oligonucleotide
ctctgaactcactttc

SEQ ID NO: 4608 - DNA, 17 bp, Artificial Sequence
  Synthetic oligonucleotide
ctctgaactcactttcc

SEQ ID NO: 4609 - DNA, 15 bp, Artificial Sequence
  Synthetic oligonucleotide
aaactctgaactcac

SEQ ID NO: 4610 - DNA, 20 bp, Artificial Sequence
  Synthetic oligonucleotide
agaataaactctgaactcac

SEQ ID NO: 4611 - DNA, 20 bp, Artificial Sequence
  Synthetic oligonucleotide
agaataaactctgaactcac

SEQ ID NO: 4612 - DNA, 15 bp, Artificial Sequence
  Synthetic oligonucleotide
aaactctgaactcac

SEQ ID NO: 4613 - DNA, 19 bp, Artificial Sequence
  Synthetic oligonucleotide
aattgttactttcctttac

SEQ ID NO: 4614 - DNA, 15 bp, Artificial Sequence
  Synthetic oligonucleotide
ttggacctttggtgc

SEQ ID NO: 4615 - DNA, 17 bp, Artificial Sequence
  Synthetic oligonucleotide
tggttggacctttggtg

SEQ ID NO: 4616 - DNA, 16 bp, Artificial Sequence
  Synthetic oligonucleotide
ccttttggtgaagttt

SEQ ID NO: 4617 - DNA, 17 bp, Artificial Sequence
  Synthetic oligonucleotide
ctaaggttggtggtaat

SEQ ID NO: 4618 - DNA, 16 bp, Artificial Sequence
  Synthetic oligonucleotide
ctttaactggaatagc

SEQ ID NO: 4619 - DNA, 18 bp, Artificial Sequence
  Synthetic oligonucleotide
tgctttaactggaatagc

SEQ ID NO: 4620 - DNA, 15 bp, Artificial Sequence
  Synthetic oligonucleotide
atagcatggaaccaa

SEQ ID NO: 4621 - DNA, 19 bp, Artificial Sequence
  Synthetic oligonucleotide
atgtatagcatggaaccaa

SEQ ID NO: 4622 - DNA, 18 bp, Artificial Sequence
  Synthetic oligonucleotide
cccagagacatgtatagc

SEQ ID NO: 4623 - DNA, 17 bp, Artificial Sequence
  Synthetic oligonucleotide
ttggtcccagagacatg

SEQ ID NO: 4624 - DNA, 20 bp, Artificial Sequence
  Synthetic oligonucleotide
ttgacaattcctattacaac

SEQ ID NO: 4625 - DNA, 18 bp, Artificial Sequence
  Synthetic oligonucleotide
aaactggaaagattgctg

SEQ ID NO: 4626 - DNA, 16 bp, Artificial Sequence
  Synthetic oligonucleotide
aaactggaaagattgc

SEQ ID NO: 4627 - DNA, 16 bp, Artificial Sequence
  Synthetic oligonucleotide
aaactggaaagattgc

SEQ ID NO: 4628 - DNA, 16 bp, Artificial Sequence
  Synthetic oligonucleotide
aaactggaaagattgc

SEQ ID NO: 4629 - DNA, 16 bp, Artificial Sequence
  Synthetic oligonucleotide
aaactggaaagattgc

SEQ ID NO: 4630 - DNA, 16 bp, Artificial Sequence
  Synthetic oligonucleotide
aaactggaaagattgc

SEQ ID NO: 4631 - DNA, 16 bp, Artificial Sequence
  Synthetic oligonucleotide
aaactggaaagattgc

SEQ ID NO: 4632 - DNA, 16 bp, Artificial Sequence
  Synthetic oligonucleotide
aaactggaaagattgc

SEQ ID NO: 4633 - DNA, 16 bp, Artificial Sequence
  Synthetic oligonucleotide
aaactggaaagattgc

SEQ ID NO: 4634 - DNA, 16 bp, Artificial Sequence
  Synthetic oligonucleotide
aaactggaaagattgc

SEQ ID NO: 4635 - DNA, 16 bp, Artificial Sequence
  Synthetic oligonucleotide
aaactggaaagattgc

SEQ ID NO: 4636 - DNA, 16 bp, Artificial Sequence
  Synthetic oligonucleotide
aaactggaaagattgc

SEQ ID NO: 4637 - DNA, 16 bp, Artificial Sequence
  Synthetic oligonucleotide
aaactggaaagattgc

SEQ ID NO: 4638 - DNA, 16 bp, Artificial Sequence
  Synthetic oligonucleotide
aaactggaaagattgc

SEQ ID NO: 4639 - DNA, 16 bp, Artificial Sequence
  Synthetic oligonucleotide
aaactggaaagattgc

SEQ ID NO: 4640 - DNA, 16 bp, Artificial Sequence
  Synthetic oligonucleotide
aaactggaaagattgc

SEQ ID NO: 4641 - DNA, 16 bp, Artificial Sequence
  Synthetic oligonucleotide
aaactggaaagattgc

SEQ ID NO: 4642 - DNA, 16 bp, Artificial Sequence
  Synthetic oligonucleotide
aaactggaaagattgc

SEQ ID NO: 4643 - DNA, 16 bp, Artificial Sequence
  Synthetic oligonucleotide
aaactggaaagattgc

SEQ ID NO: 4644 - DNA, 16 bp, Artificial Sequence
  Synthetic oligonucleotide
aaactggaaagattgc

SEQ ID NO: 4645 - DNA, 16 bp, Artificial Sequence
  Synthetic oligonucleotide
aaactggaaagattgc

SEQ ID NO: 4646 - DNA, 16 bp, Artificial Sequence
  Synthetic oligonucleotide
aaactggaaagattgc

SEQ ID NO: 4647 - DNA, 16 bp, Artificial Sequence
  Synthetic oligonucleotide
aaactggaaagattgc

SEQ ID NO: 4648 - DNA, 16 bp, Artificial Sequence
  Synthetic oligonucleotide
aaactggaaagattgc

SEQ ID NO: 4649 - DNA, 16 bp, Artificial Sequence
  Synthetic oligonucleotide
aaactggaaagattgc

SEQ ID NO: 4650 - DNA, 16 bp, Artificial Sequence
  Synthetic oligonucleotide
aaactggaaagattgc

SEQ ID NO: 4651 - DNA, 16 bp, Artificial Sequence
  Synthetic oligonucleotide
aaactggaaagattgc

SEQ ID NO: 4652 - DNA, 16 bp, Artificial Sequence
  Synthetic oligonucleotide
aaactggaaagattgc

SEQ ID NO: 4653 - DNA, 16 bp, Artificial Sequence
  Synthetic oligonucleotide
aaactggaaagattgc

SEQ ID NO: 4654 - DNA, 16 bp, Artificial Sequence
  Synthetic oligonucleotide
aaactggaaagattgc

SEQ ID NO: 4655 - DNA, 16 bp, Artificial Sequence
  Synthetic oligonucleotide
aaactggaaagattgc

SEQ ID NO: 4656 - DNA, 16 bp, Artificial Sequence
  Synthetic oligonucleotide
aaactggaaagattgc

SEQ ID NO: 4657 - DNA, 16 bp, Artificial Sequence
  Synthetic oligonucleotide
aaactggaaagattgc

SEQ ID NO: 4658 - DNA, 16 bp, Artificial Sequence
  Synthetic oligonucleotide
aaactggaaagattgc

SEQ ID NO: 4659 - DNA, 16 bp, Artificial Sequence
  Synthetic oligonucleotide
aaactggaaagattgc

SEQ ID NO: 4660 - DNA, 16 bp, Artificial Sequence
  Synthetic oligonucleotide
aaactggaaagattgc

SEQ ID NO: 4661 - DNA, 16 bp, Artificial Sequence
  Synthetic oligonucleotide
aaactggaaagattgc

SEQ ID NO: 4662 - DNA, 16 bp, Artificial Sequence
  Synthetic oligonucleotide
aaactggaaagattgc

SEQ ID NO: 4663 - DNA, 16 bp, Artificial Sequence
  Synthetic oligonucleotide
aaactggaaagattgc

SEQ ID NO: 4664 - DNA, 16 bp, Artificial Sequence
  Synthetic oligonucleotide
aaactggaaagattgc

SEQ ID NO: 4665 - DNA, 16 bp, Artificial Sequence
  Synthetic oligonucleotide
aaactggaaagattgc

SEQ ID NO: 4666 - DNA, 16 bp, Artificial Sequence
  Synthetic oligonucleotide
aaactggaaagattgc

SEQ ID NO: 4667 - DNA, 16 bp, Artificial Sequence
  Synthetic oligonucleotide
aaactggaaagattgc

SEQ ID NO: 4668 - DNA, 16 bp, Artificial Sequence
  Synthetic oligonucleotide
aaactggaaagattgc

SEQ ID NO: 4669 - DNA, 16 bp, Artificial Sequence
  Synthetic oligonucleotide
aaactggaaagattgc

SEQ ID NO: 4670 - DNA, 16 bp, Artificial Sequence
  Synthetic oligonucleotide
aaactggaaagattgc

SEQ ID NO: 4671 - DNA, 16 bp, Artificial Sequence
  Synthetic oligonucleotide
aaactggaaagattgc

SEQ ID NO: 4672 - DNA, 16 bp, Artificial Sequence
  Synthetic oligonucleotide
aaactggaaagattgc

SEQ ID NO: 4673 - DNA, 16 bp, Artificial Sequence
  Synthetic oligonucleotide
aaactggaaagattgc

SEQ ID NO: 4674 - DNA, 16 bp, Artificial Sequence
  Synthetic oligonucleotide
aaactggaaagattgc

SEQ ID NO: 4675 - DNA, 16 bp, Artificial Sequence
  Synthetic oligonucleotide
aaactggaaagattgc

SEQ ID NO: 4676 - DNA, 16 bp, Artificial Sequence
  Synthetic oligonucleotide
aaactggaaagattgc

SEQ ID NO: 4677 - DNA, 16 bp, Artificial Sequence
  Synthetic oligonucleotide
aaactggaaagattgc

SEQ ID NO: 4678 - DNA, 16 bp, Artificial Sequence
  Synthetic oligonucleotide
aaactggaaagattgc

SEQ ID NO: 4679 - DNA, 16 bp, Artificial Sequence
  Synthetic oligonucleotide
aaactggaaagattgc

SEQ ID NO: 4680 - DNA, 16 bp, Artificial Sequence
  Synthetic oligonucleotide
aaactggaaagattgc

SEQ ID NO: 4681 - DNA, 16 bp, Artificial Sequence
  Synthetic oligonucleotide
aaactggaaagattgc

SEQ ID NO: 4682 - DNA, 16 bp, Artificial Sequence
  Synthetic oligonucleotide
aaactggaaagattgc

SEQ ID NO: 4683 - DNA, 16 bp, Artificial Sequence
  Synthetic oligonucleotide
aaactggaaagattgc

SEQ ID NO: 4684 - DNA, 16 bp, Artificial Sequence
  Synthetic oligonucleotide
aaactggaaagattgc

SEQ ID NO: 4685 - DNA, 16 bp, Artificial Sequence
  Synthetic oligonucleotide
aaactggaaagattgc

SEQ ID NO: 4686 - DNA, 16 bp, Artificial Sequence
  Synthetic oligonucleotide
aaactggaaagattgc

SEQ ID NO: 4687 - DNA, 16 bp, Artificial Sequence
  Synthetic oligonucleotide
aaactggaaagattgc

SEQ ID NO: 4688 - DNA, 16 bp, Artificial Sequence
  Synthetic oligonucleotide
aaactggaaagattgc

SEQ ID NO: 4689 - DNA, 16 bp, Artificial Sequence
  Synthetic oligonucleotide
aaactggaaagattgc

SEQ ID NO: 4690 - DNA, 16 bp, Artificial Sequence
  Synthetic oligonucleotide
aaactggaaagattgc

SEQ ID NO: 4691 - DNA, 16 bp, Artificial Sequence
  Synthetic oligonucleotide
aaactggaaagattgc

SEQ ID NO: 4692 - DNA, 16 bp, Artificial Sequence
  Synthetic oligonucleotide
aaactggaaagattgc

SEQ ID NO: 4693 - DNA, 18 bp, Artificial Sequence
  Synthetic oligonucleotide
aaactggaaagattgctg

SEQ ID NO: 4694 - DNA, 16 bp, Artificial Sequence
  Synthetic oligonucleotide
aaactggaaagattgc

SEQ ID NO: 4695 - DNA, 16 bp, Artificial Sequence
  Synthetic oligonucleotide
aaactggaaagattgc

SEQ ID NO: 4696 - DNA, 16 bp, Artificial Sequence
  Synthetic oligonucleotide
aaactggaaagattgc

SEQ ID NO: 4697 - DNA, 16 bp, Artificial Sequence
  Synthetic oligonucleotide
aaactggaaagattgc

SEQ ID NO: 4698 - DNA, 16 bp, Artificial Sequence
  Synthetic oligonucleotide
aaactggaaagattgc

SEQ ID NO: 4699 - DNA, 16 bp, Artificial Sequence
  Synthetic oligonucleotide
aaactggaaagattgc

SEQ ID NO: 4700 - DNA, 16 bp, Artificial Sequence
  Synthetic oligonucleotide
aaactggaaagattgc

SEQ ID NO: 4701 - DNA, 16 bp, Artificial Sequence
  Synthetic oligonucleotide
aaactggaaagattgc

SEQ ID NO: 4702 - DNA, 16 bp, Artificial Sequence
  Synthetic oligonucleotide
aaactggaaagattgc

SEQ ID NO: 4703 - DNA, 16 bp, Artificial Sequence
  Synthetic oligonucleotide
aaactggaaagattgc

SEQ ID NO: 4704 - DNA, 16 bp, Artificial Sequence
  Synthetic oligonucleotide
aaactggaaagattgc

SEQ ID NO: 4705 - DNA, 16 bp, Artificial Sequence
  Synthetic oligonucleotide
aaactggaaagattgc

SEQ ID NO: 4706 - DNA, 16 bp, Artificial Sequence
  Synthetic oligonucleotide
aaactggaaagattgc

SEQ ID NO: 4707 - DNA, 16 bp, Artificial Sequence
  Synthetic oligonucleotide
aaactggaaagattgc

SEQ ID NO: 4708 - DNA, 16 bp, Artificial Sequence
  Synthetic oligonucleotide
aaactggaaagattgc

SEQ ID NO: 4709 - DNA, 16 bp, Artificial Sequence
  Synthetic oligonucleotide
aaactggaaagattgc

SEQ ID NO: 4710 - DNA, 16 bp, Artificial Sequence
  Synthetic oligonucleotide
aaactggaaagattgc

SEQ ID NO: 4711 - DNA, 16 bp, Artificial Sequence
  Synthetic oligonucleotide
aaactggaaagattgc

SEQ ID NO: 4712 - DNA, 16 bp, Artificial Sequence
  Synthetic oligonucleotide
aaactggaaagattgc

SEQ ID NO: 4713 - DNA, 16 bp, Artificial Sequence
  Synthetic oligonucleotide
aaactggaaagattgc

SEQ ID NO: 4714 - DNA, 16 bp, Artificial Sequence
  Synthetic oligonucleotide
aaactggaaagattgc

SEQ ID NO: 4715 - DNA, 16 bp, Artificial Sequence
  Synthetic oligonucleotide
aaactggaaagattgc

SEQ ID NO: 4716 - DNA, 16 bp, Artificial Sequence
  Synthetic oligonucleotide
aaactggaaagattgc

SEQ ID NO: 4717 - DNA, 16 bp, Artificial Sequence
  Synthetic oligonucleotide
aaactggaaagattgc

SEQ ID NO: 4718 - DNA, 16 bp, Artificial Sequence
  Synthetic oligonucleotide
aaactggaaagattgc

SEQ ID NO: 4719 - DNA, 16 bp, Artificial Sequence
  Synthetic oligonucleotide
aaactggaaagattgc

SEQ ID NO: 4720 - DNA, 16 bp, Artificial Sequence
  Synthetic oligonucleotide
aaactggaaagattgc

SEQ ID NO: 4721 - DNA, 16 bp, Artificial Sequence
  Synthetic oligonucleotide
aaactggaaagattgc

SEQ ID NO: 4722 - DNA, 16 bp, Artificial Sequence
  Synthetic oligonucleotide
aaactggaaagattgc

SEQ ID NO: 4723 - DNA, 16 bp, Artificial Sequence
  Synthetic oligonucleotide
aaactggaaagattgc

SEQ ID NO: 4724 - DNA, 16 bp, Artificial Sequence
  Synthetic oligonucleotide
aaactggaaagattgc

SEQ ID NO: 4725 - DNA, 16 bp, Artificial Sequence
  Synthetic oligonucleotide
aaactggaaagattgc

SEQ ID NO: 4726 - DNA, 16 bp, Artificial Sequence
  Synthetic oligonucleotide
aaactggaaagattgc

SEQ ID NO: 4727 - DNA, 16 bp, Artificial Sequence
  Synthetic oligonucleotide
aaactggaaagattgc

SEQ ID NO: 4728 - DNA, 16 bp, Artificial Sequence
  Synthetic oligonucleotide
aaactggaaagattgc

SEQ ID NO: 4729 - DNA, 16 bp, Artificial Sequence
  Synthetic oligonucleotide
aaactggaaagattgc

SEQ ID NO: 4730 - DNA, 16 bp, Artificial Sequence
  Synthetic oligonucleotide
aaactggaaagattgc

SEQ ID NO: 4731 - DNA, 16 bp, Artificial Sequence
  Synthetic oligonucleotide
aaactggaaagattgc

SEQ ID NO: 4732 - DNA, 16 bp, Artificial Sequence
  Synthetic oligonucleotide
aaactggaaagattgc

SEQ ID NO: 4733 - DNA, 16 bp, Artificial Sequence
  Synthetic oligonucleotide
aaactggaaagattgc

SEQ ID NO: 4734 - DNA, 16 bp, Artificial Sequence
  Synthetic oligonucleotide
aaactggaaagattgc

SEQ ID NO: 4735 - DNA, 16 bp, Artificial Sequence
  Synthetic oligonucleotide
aaactggaaagattgc

SEQ ID NO: 4736 - DNA, 16 bp, Artificial Sequence
  Synthetic oligonucleotide
aaactggaaagattgc

SEQ ID NO: 4737 - DNA, 16 bp, Artificial Sequence
  Synthetic oligonucleotide
aaactggaaagattgc

SEQ ID NO: 4738 - DNA, 16 bp, Artificial Sequence
  Synthetic oligonucleotide
aaactggaaagattgc

SEQ ID NO: 4739 - DNA, 16 bp, Artificial Sequence
  Synthetic oligonucleotide
aaactggaaagattgc

SEQ ID NO: 4740 - DNA, 16 bp, Artificial Sequence
  Synthetic oligonucleotide
aaactggaaagattgc

SEQ ID NO: 4741 - DNA, 16 bp, Artificial Sequence
  Synthetic oligonucleotide
aaactggaaagattgc

SEQ ID NO: 4742 - DNA, 16 bp, Artificial Sequence
  Synthetic oligonucleotide
aaactggaaagattgc

SEQ ID NO: 4743 - DNA, 16 bp, Artificial Sequence
  Synthetic oligonucleotide
aaactggaaagattgc

SEQ ID NO: 4744 - DNA, 16 bp, Artificial Sequence
  Synthetic oligonucleotide
aaactggaaagattgc

SEQ ID NO: 4745 - DNA, 16 bp, Artificial Sequence
  Synthetic oligonucleotide
aaactggaaagattgc

SEQ ID NO: 4746 - DNA, 16 bp, Artificial Sequence
  Synthetic oligonucleotide
aaactggaaagattgc

SEQ ID NO: 4747 - DNA, 16 bp, Artificial Sequence
  Synthetic oligonucleotide
aaactggaaagattgc

SEQ ID NO: 4748 - DNA, 16 bp, Artificial Sequence
  Synthetic oligonucleotide
aaactggaaagattgc

SEQ ID NO: 4749 - DNA, 16 bp, Artificial Sequence
  Synthetic oligonucleotide
aaactggaaagattgc

SEQ ID NO: 4750 - DNA, 16 bp, Artificial Sequence
  Synthetic oligonucleotide
aaactggaaagattgc

SEQ ID NO: 4751 - DNA, 17 bp, Artificial Sequence
  Synthetic oligonucleotide
caaactggaaagattgc

SEQ ID NO: 4752 - DNA, 16 bp, Artificial Sequence
  Synthetic oligonucleotide
cttgattctaaggttg

SEQ ID NO: 4753 - DNA, 17 bp, Artificial Sequence
  Synthetic oligonucleotide
ctggttgtaagattaac

SEQ ID NO: 4754 - DNA, 16 bp, Artificial Sequence
  Synthetic oligonucleotide
ctggttgtaagattaa

SEQ ID NO: 4755 - DNA, 16 bp, Artificial Sequence
  Synthetic oligonucleotide
ctggttgtaagattaa

SEQ ID NO: 4756 - DNA, 16 bp, Artificial Sequence
  Synthetic oligonucleotide
ctggttgtaagattaa

SEQ ID NO: 4757 - DNA, 19 bp, Artificial Sequence
  Synthetic oligonucleotide
atgtaaagcaagtaaagtt

SEQ ID NO: 4758 - DNA, 19 bp, Artificial Sequence
  Synthetic oligonucleotide
atgtaaagcaagtaaagtt

SEQ ID NO: 4759 - DNA, 19 bp, Artificial Sequence
  Synthetic oligonucleotide
tcaaactttacttgcttta

SEQ ID NO: 4760 - DNA, 18 bp, Artificial Sequence
  Synthetic oligonucleotide
aaactttacttgctttac

SEQ ID NO: 4761 - DNA, 18 bp, Artificial Sequence
  Synthetic oligonucleotide
aaactttacttgctttac

SEQ ID NO: 4762 - DNA, 18 bp, Artificial Sequence
  Synthetic oligonucleotide
aaactttacttgctttac

SEQ ID NO: 4763 - DNA, 18 bp, Artificial Sequence
  Synthetic oligonucleotide
aaactttacttgctttac

SEQ ID NO: 4764 - DNA, 18 bp, Artificial Sequence
  Synthetic oligonucleotide
aaactttacttgctttac

SEQ ID NO: 4765 - DNA, 18 bp, Artificial Sequence
  Synthetic oligonucleotide
aaactttacttgctttac

SEQ ID NO: 4766 - DNA, 18 bp, Artificial Sequence
  Synthetic oligonucleotide
aaactttacttgctttac

SEQ ID NO: 4767 - DNA, 18 bp, Artificial Sequence
  Synthetic oligonucleotide
aaactttacttgctttac

SEQ ID NO: 4768 - DNA, 18 bp, Artificial Sequence
  Synthetic oligonucleotide
aaactttacttgctttac

SEQ ID NO: 4769 - DNA, 18 bp, Artificial Sequence
  Synthetic oligonucleotide
aaactttacttgctttac

SEQ ID NO: 4770 - DNA, 18 bp, Artificial Sequence
  Synthetic oligonucleotide
aaactttacttgctttac

SEQ ID NO: 4771 - DNA, 18 bp, Artificial Sequence
  Synthetic oligonucleotide
aaactttacttgctttac

SEQ ID NO: 4772 - DNA, 18 bp, Artificial Sequence
  Synthetic oligonucleotide
aaactttacttgctttac

SEQ ID NO: 4773 - DNA, 18 bp, Artificial Sequence
  Synthetic oligonucleotide
aaactttacttgctttac

SEQ ID NO: 4774 - DNA, 18 bp, Artificial Sequence
  Synthetic oligonucleotide
aaactttacttgctttac

SEQ ID NO: 4775 - DNA, 18 bp, Artificial Sequence
  Synthetic oligonucleotide
aaactttacttgctttac

SEQ ID NO: 4776 - DNA, 18 bp, Artificial Sequence
  Synthetic oligonucleotide
aaactttacttgctttac

SEQ ID NO: 4777 - DNA, 18 bp, Artificial Sequence
  Synthetic oligonucleotide
aaactttacttgctttac

SEQ ID NO: 4778 - DNA, 18 bp, Artificial Sequence
  Synthetic oligonucleotide
aaactttacttgctttac

SEQ ID NO: 4779 - DNA, 18 bp, Artificial Sequence
  Synthetic oligonucleotide
aaactttacttgctttac

SEQ ID NO: 4780 - DNA, 18 bp, Artificial Sequence
  Synthetic oligonucleotide
aaactttacttgctttac

SEQ ID NO: 4781 - DNA, 18 bp, Artificial Sequence
  Synthetic oligonucleotide
aaactttacttgctttac

SEQ ID NO: 4782 - DNA, 19 bp, Artificial Sequence
  Synthetic oligonucleotide
acaatctatacaggtaatt

SEQ ID NO: 4783 - DNA, 20 bp, Artificial Sequence
  Synthetic oligonucleotide
caatctatacaggtaattat

SEQ ID NO: 4784 - DNA, 19 bp, Artificial Sequence
  Synthetic oligonucleotide
aatgcttcagttgtaaaca

SEQ ID NO: 4785 - DNA, 17 bp, Artificial Sequence
  Synthetic oligonucleotide
caagattgttagaattc

SEQ ID NO: 4786 - DNA, 17 bp, Artificial Sequence
  Synthetic oligonucleotide
caagattgttagaattc

SEQ ID NO: 4787 - DNA, 19 bp, Artificial Sequence
  Synthetic oligonucleotide
ttagaatcaagattgttag

SEQ ID NO: 4788 - DNA, 20 bp, Artificial Sequence
  Synthetic oligonucleotide
accttagaatcaagattgtt

SEQ ID NO: 4789 - DNA, 20 bp, Artificial Sequence
  Synthetic oligonucleotide
atctatacaggtaattataa

SEQ ID NO: 4790 - DNA, 18 bp, Artificial Sequence
  Synthetic oligonucleotide
atacaggtaattataatt

SEQ ID NO: 4791 - DNA, 20 bp, Artificial Sequence
  Synthetic oligonucleotide
atctatacaggtaattataa

SEQ ID NO: 4792 - DNA, 20 bp, Artificial Sequence
  Synthetic oligonucleotide
caatctatacaggtaattat

SEQ ID NO: 4793 - DNA, 18 bp, Artificial Sequence
  Synthetic oligonucleotide
aaggtttgagattagact

SEQ ID NO: 4794 - DNA, 19 bp, Artificial Sequence
  Synthetic oligonucleotide
aaaaggtttgagattagac

SEQ ID NO: 4795 - DNA, 13 bp, Artificial Sequence
  Synthetic oligonucleotide
ccggtagcacacc

SEQ ID NO: 4796 - DNA, 15 bp, Artificial Sequence
  Synthetic oligonucleotide
ccggtagcacacctt

SEQ ID NO: 4797 - DNA, 18 bp, Artificial Sequence
  Synthetic oligonucleotide
aaggtttgagattagact

SEQ ID NO: 4798 - DNA, 18 bp, Artificial Sequence
  Synthetic oligonucleotide
aaggtttgagattagact

SEQ ID NO: 4799 - DNA, 18 bp, Artificial Sequence
  Synthetic oligonucleotide
taggaagtctaatctcaa

SEQ ID NO: 4800 - DNA, 18 bp, Artificial Sequence
  Synthetic oligonucleotide
taggaagtctaatctcaa

SEQ ID NO: 4801 - DNA, 16 bp, Artificial Sequence
  Synthetic oligonucleotide
aacccactaatggtgt

SEQ ID NO: 4802 - DNA, 16 bp, Artificial Sequence
  Synthetic oligonucleotide
aacccactaatggtgt

SEQ ID NO: 4803 - DNA, 16 bp, Artificial Sequence
  Synthetic oligonucleotide
caacccactaatggtg

SEQ ID NO: 4804 - DNA, 16 bp, Artificial Sequence
  Synthetic oligonucleotide
caacccactaatggtg

SEQ ID NO: 4805 - DNA, 15 bp, Artificial Sequence
  Synthetic oligonucleotide
aacccactaatggtg

SEQ ID NO: 4806 - DNA, 16 bp, Artificial Sequence
  Synthetic oligonucleotide
ccaacaccattagtgg

SEQ ID NO: 4807 - DNA, 15 bp, Artificial Sequence
  Synthetic oligonucleotide
caacaccattagtgg

SEQ ID NO: 4808 - DNA, 14 bp, Artificial Sequence
  Synthetic oligonucleotide
acccactaatggtg

SEQ ID NO: 4809 - DNA, 14 bp, Artificial Sequence
  Synthetic oligonucleotide
acccactaatggtg

SEQ ID NO: 4810 - DNA, 15 bp, Artificial Sequence
  Synthetic oligonucleotide
cgatgagaattagtc

SEQ ID NO: 4811 - DNA, 13 bp, Artificial Sequence
  Synthetic oligonucleotide
ccgaggagaatta

SEQ ID NO: 4812 - DNA, 14 bp, Artificial Sequence
  Synthetic oligonucleotide
cgccgaggagaatt

SEQ ID NO: 4813 - DNA, 15 bp, Artificial Sequence
  Synthetic oligonucleotide
aagcacggtttaatt

SEQ ID NO: 4814 - DNA, 13 bp, Artificial Sequence
  Synthetic oligonucleotide
aaggccgttaaac

SEQ ID NO: 4815 - DNA, 17 bp, Artificial Sequence
  Synthetic oligonucleotide
cagtaaggccgttaaac

SEQ ID NO: 4816 - DNA, 14 bp, Artificial Sequence
  Synthetic oligonucleotide
caccaaaattggag

SEQ ID NO: 4817 - DNA, 17 bp, Artificial Sequence
  Synthetic oligonucleotide
ttgcaccaaaattggag

SEQ ID NO: 4818 - DNA, 18 bp, Artificial Sequence
  Synthetic oligonucleotide
ctcaattaccccctgcat

SEQ ID NO: 4819 - DNA, 20 bp, Artificial Sequence
  Synthetic oligonucleotide
ctcaattaccccctgcatac

SEQ ID NO: 4820 - DNA, 14 bp, Artificial Sequence
  Synthetic oligonucleotide
ccgccgaggagaat

SEQ ID NO: 4821 - DNA, 13 bp, Artificial Sequence
  Synthetic oligonucleotide
cgccgaggagaat

SEQ ID NO: 4822 - DNA, 13 bp, Artificial Sequence
  Synthetic oligonucleotide
cccgccgaggaga

SEQ ID NO: 4823 - DNA, 20 bp, Artificial Sequence
  Synthetic oligonucleotide
tcagactaattctcctcggc

SEQ ID NO: 4824 - DNA, 19 bp, Artificial Sequence
  Synthetic oligonucleotide
agactaattctcctcggcg

SEQ ID NO: 4825 - DNA, 16 bp, Artificial Sequence
  Synthetic oligonucleotide
aattctcctcggcggg

SEQ ID NO: 4826 - DNA, 16 bp, Artificial Sequence
  Synthetic oligonucleotide
aattctcctcggcggg

SEQ ID NO: 4827 - DNA, 16 bp, Artificial Sequence
  Synthetic oligonucleotide
aattctcctcggcggg

SEQ ID NO: 4828 - DNA, 16 bp, Artificial Sequence
  Synthetic oligonucleotide
aattctcctcggcggg

SEQ ID NO: 4829 - DNA, 16 bp, Artificial Sequence
  Synthetic oligonucleotide
aattctcctcggcggg

SEQ ID NO: 4830 - DNA, 16 bp, Artificial Sequence
  Synthetic oligonucleotide
aattctcctcggcggg

SEQ ID NO: 4831 - DNA, 16 bp, Artificial Sequence
  Synthetic oligonucleotide
aattctcctcggcggg

SEQ ID NO: 4832 - DNA, 16 bp, Artificial Sequence
  Synthetic oligonucleotide
aattctcctcggcggg

SEQ ID NO: 4833 - DNA, 16 bp, Artificial Sequence
  Synthetic oligonucleotide
aattctcctcggcggg

SEQ ID NO: 4834 - DNA, 16 bp, Artificial Sequence
  Synthetic oligonucleotide
aattctcctcggcggg

SEQ ID NO: 4835 - DNA, 16 bp, Artificial Sequence
  Synthetic oligonucleotide
aattctcctcggcggg

SEQ ID NO: 4836 - DNA, 16 bp, Artificial Sequence
  Synthetic oligonucleotide
aattctcctcggcggg

SEQ ID NO: 4837 - DNA, 16 bp, Artificial Sequence
  Synthetic oligonucleotide
aattctcctcggcggg

SEQ ID NO: 4838 - DNA, 16 bp, Artificial Sequence
  Synthetic oligonucleotide
aattctcctcggcggg

SEQ ID NO: 4839 - DNA, 16 bp, Artificial Sequence
  Synthetic oligonucleotide
aattctcctcggcggg

SEQ ID NO: 4840 - DNA, 16 bp, Artificial Sequence
  Synthetic oligonucleotide
aattctcctcggcggg

SEQ ID NO: 4841 - DNA, 16 bp, Artificial Sequence
  Synthetic oligonucleotide
aattctcctcggcggg

SEQ ID NO: 4842 - DNA, 16 bp, Artificial Sequence
  Synthetic oligonucleotide
aattctcctcggcggg

SEQ ID NO: 4843 - DNA, 16 bp, Artificial Sequence
  Synthetic oligonucleotide
aattctcctcggcggg

SEQ ID NO: 4844 - DNA, 16 bp, Artificial Sequence
  Synthetic oligonucleotide
aattctcctcggcggg

SEQ ID NO: 4845 - DNA, 16 bp, Artificial Sequence
  Synthetic oligonucleotide
aattctcctcggcggg

SEQ ID NO: 4846 - DNA, 16 bp, Artificial Sequence
  Synthetic oligonucleotide
aattctcctcggcggg

SEQ ID NO: 4847 - DNA, 16 bp, Artificial Sequence
  Synthetic oligonucleotide
aattctcctcggcggg

SEQ ID NO: 4848 - DNA, 16 bp, Artificial Sequence
  Synthetic oligonucleotide
aattctcctcggcggg

SEQ ID NO: 4849 - DNA, 16 bp, Artificial Sequence
  Synthetic oligonucleotide
aattctcctcggcggg

SEQ ID NO: 4850 - DNA, 16 bp, Artificial Sequence
  Synthetic oligonucleotide
aattctcctcggcggg

SEQ ID NO: 4851 - DNA, 16 bp, Artificial Sequence
  Synthetic oligonucleotide
aattctcctcggcggg

SEQ ID NO: 4852 - DNA, 16 bp, Artificial Sequence
  Synthetic oligonucleotide
aattctcctcggcggg

SEQ ID NO: 4853 - DNA, 16 bp, Artificial Sequence
  Synthetic oligonucleotide
aattctcctcggcggg

SEQ ID NO: 4854 - DNA, 16 bp, Artificial Sequence
  Synthetic oligonucleotide
aattctcctcggcggg

SEQ ID NO: 4855 - DNA, 16 bp, Artificial Sequence
  Synthetic oligonucleotide
aattctcctcggcggg

SEQ ID NO: 4856 - DNA, 16 bp, Artificial Sequence
  Synthetic oligonucleotide
aattctcctcggcggg

SEQ ID NO: 4857 - DNA, 16 bp, Artificial Sequence
  Synthetic oligonucleotide
aattctcctcggcggg

SEQ ID NO: 4858 - DNA, 16 bp, Artificial Sequence
  Synthetic oligonucleotide
aattctcctcggcggg

SEQ ID NO: 4859 - DNA, 16 bp, Artificial Sequence
  Synthetic oligonucleotide
aattctcctcggcggg

SEQ ID NO: 4860 - DNA, 16 bp, Artificial Sequence
  Synthetic oligonucleotide
aattctcctcggcggg

SEQ ID NO: 4861 - DNA, 16 bp, Artificial Sequence
  Synthetic oligonucleotide
aattctcctcggcggg

SEQ ID NO: 4862 - DNA, 16 bp, Artificial Sequence
  Synthetic oligonucleotide
aattctcctcggcggg

SEQ ID NO: 4863 - DNA, 16 bp, Artificial Sequence
  Synthetic oligonucleotide
aattctcctcggcggg

SEQ ID NO: 4864 - DNA, 16 bp, Artificial Sequence
  Synthetic oligonucleotide
aattctcctcggcggg

SEQ ID NO: 4865 - DNA, 16 bp, Artificial Sequence
  Synthetic oligonucleotide
aattctcctcggcggg

SEQ ID NO: 4866 - DNA, 16 bp, Artificial Sequence
  Synthetic oligonucleotide
aattctcctcggcggg

SEQ ID NO: 4867 - DNA, 16 bp, Artificial Sequence
  Synthetic oligonucleotide
aattctcctcggcggg

SEQ ID NO: 4868 - DNA, 16 bp, Artificial Sequence
  Synthetic oligonucleotide
aattctcctcggcggg

SEQ ID NO: 4869 - DNA, 16 bp, Artificial Sequence
  Synthetic oligonucleotide
aattctcctcggcggg

SEQ ID NO: 4870 - DNA, 16 bp, Artificial Sequence
  Synthetic oligonucleotide
aattctcctcggcggg

SEQ ID NO: 4871 - DNA, 16 bp, Artificial Sequence
  Synthetic oligonucleotide
aattctcctcggcggg

SEQ ID NO: 4872 - DNA, 16 bp, Artificial Sequence
  Synthetic oligonucleotide
aattctcctcggcggg

SEQ ID NO: 4873 - DNA, 16 bp, Artificial Sequence
  Synthetic oligonucleotide
aattctcctcggcggg

SEQ ID NO: 4874 - DNA, 16 bp, Artificial Sequence
  Synthetic oligonucleotide
aattctcctcggcggg

SEQ ID NO: 4875 - DNA, 16 bp, Artificial Sequence
  Synthetic oligonucleotide
aattctcctcggcggg

SEQ ID NO: 4876 - DNA, 16 bp, Artificial Sequence
  Synthetic oligonucleotide
aattctcctcggcggg

SEQ ID NO: 4877 - DNA, 16 bp, Artificial Sequence
  Synthetic oligonucleotide
aattctcctcggcggg

SEQ ID NO: 4878 - DNA, 16 bp, Artificial Sequence
  Synthetic oligonucleotide
aattctcctcggcggg

SEQ ID NO: 4879 - DNA, 16 bp, Artificial Sequence
  Synthetic oligonucleotide
aattctcctcggcggg

SEQ ID NO: 4880 - DNA, 16 bp, Artificial Sequence
  Synthetic oligonucleotide
aattctcctcggcggg

SEQ ID NO: 4881 - DNA, 16 bp, Artificial Sequence
  Synthetic oligonucleotide
aattctcctcggcggg

SEQ ID NO: 4882 - DNA, 16 bp, Artificial Sequence
  Synthetic oligonucleotide
aattctcctcggcggg

SEQ ID NO: 4883 - DNA, 16 bp, Artificial Sequence
  Synthetic oligonucleotide
aattctcctcggcggg

SEQ ID NO: 4884 - DNA, 16 bp, Artificial Sequence
  Synthetic oligonucleotide
aattctcctcggcggg

SEQ ID NO: 4885 - DNA, 16 bp, Artificial Sequence
  Synthetic oligonucleotide
aattctcctcggcggg

SEQ ID NO: 4886 - DNA, 16 bp, Artificial Sequence
  Synthetic oligonucleotide
aattctcctcggcggg

SEQ ID NO: 4887 - DNA, 16 bp, Artificial Sequence
  Synthetic oligonucleotide
aattctcctcggcggg

SEQ ID NO: 4888 - DNA, 16 bp, Artificial Sequence
  Synthetic oligonucleotide
aattctcctcggcggg

SEQ ID NO: 4889 - DNA, 16 bp, Artificial Sequence
  Synthetic oligonucleotide
aattctcctcggcggg

SEQ ID NO: 4890 - DNA, 16 bp, Artificial Sequence
  Synthetic oligonucleotide
aattctcctcggcggg

SEQ ID NO: 4891 - DNA, 16 bp, Artificial Sequence
  Synthetic oligonucleotide
aattctcctcggcggg

SEQ ID NO: 4892 - DNA, 16 bp, Artificial Sequence
  Synthetic oligonucleotide
aattctcctcggcggg

SEQ ID NO: 4893 - DNA, 16 bp, Artificial Sequence
  Synthetic oligonucleotide
aattctcctcggcggg

SEQ ID NO: 4894 - DNA, 16 bp, Artificial Sequence
  Synthetic oligonucleotide
aattctcctcggcggg

SEQ ID NO: 4895 - DNA, 16 bp, Artificial Sequence
  Synthetic oligonucleotide
aattctcctcggcggg

SEQ ID NO: 4896 - DNA, 16 bp, Artificial Sequence
  Synthetic oligonucleotide
aattctcctcggcggg

SEQ ID NO: 4897 - DNA, 16 bp, Artificial Sequence
  Synthetic oligonucleotide
aattctcctcggcggg

SEQ ID NO: 4898 - DNA, 16 bp, Artificial Sequence
  Synthetic oligonucleotide
aattctcctcggcggg

SEQ ID NO: 4899 - DNA, 16 bp, Artificial Sequence
  Synthetic oligonucleotide
aattctcctcggcggg

SEQ ID NO: 4900 - DNA, 16 bp, Artificial Sequence
  Synthetic oligonucleotide
aattctcctcggcggg

SEQ ID NO: 4901 - DNA, 16 bp, Artificial Sequence
  Synthetic oligonucleotide
aattctcctcggcggg

SEQ ID NO: 4902 - DNA, 16 bp, Artificial Sequence
  Synthetic oligonucleotide
aattctcctcggcggg

SEQ ID NO: 4903 - DNA, 16 bp, Artificial Sequence
  Synthetic oligonucleotide
aattctcctcggcggg

SEQ ID NO: 4904 - DNA, 16 bp, Artificial Sequence
  Synthetic oligonucleotide
aattctcctcggcggg

SEQ ID NO: 4905 - DNA, 16 bp, Artificial Sequence
  Synthetic oligonucleotide
aattctcctcggcggg

SEQ ID NO: 4906 - DNA, 16 bp, Artificial Sequence
  Synthetic oligonucleotide
aattctcctcggcggg

SEQ ID NO: 4907 - DNA, 16 bp, Artificial Sequence
  Synthetic oligonucleotide
aattctcctcggcggg

SEQ ID NO: 4908 - DNA, 16 bp, Artificial Sequence
  Synthetic oligonucleotide
aattctcctcggcggg

SEQ ID NO: 4909 - DNA, 16 bp, Artificial Sequence
  Synthetic oligonucleotide
aattctcctcggcggg

SEQ ID NO: 4910 - DNA, 16 bp, Artificial Sequence
  Synthetic oligonucleotide
aattctcctcggcggg

SEQ ID NO: 4911 - DNA, 16 bp, Artificial Sequence
  Synthetic oligonucleotide
aattctcctcggcggg

SEQ ID NO: 4912 - DNA, 16 bp, Artificial Sequence
  Synthetic oligonucleotide
aattctcctcggcggg

SEQ ID NO: 4913 - DNA, 16 bp, Artificial Sequence
  Synthetic oligonucleotide
aattctcctcggcggg

SEQ ID NO: 4914 - DNA, 16 bp, Artificial Sequence
  Synthetic oligonucleotide
aattctcctcggcggg

SEQ ID NO: 4915 - DNA, 16 bp, Artificial Sequence
  Synthetic oligonucleotide
aattctcctcggcggg

SEQ ID NO: 4916 - DNA, 16 bp, Artificial Sequence
  Synthetic oligonucleotide
aattctcctcggcggg

SEQ ID NO: 4917 - DNA, 16 bp, Artificial Sequence
  Synthetic oligonucleotide
aattctcctcggcggg

SEQ ID NO: 4918 - DNA, 16 bp, Artificial Sequence
  Synthetic oligonucleotide
aattctcctcggcggg

SEQ ID NO: 4919 - DNA, 16 bp, Artificial Sequence
  Synthetic oligonucleotide
aattctcctcggcggg

SEQ ID NO: 4920 - DNA, 16 bp, Artificial Sequence
  Synthetic oligonucleotide
aattctcctcggcggg

SEQ ID NO: 4921 - DNA, 16 bp, Artificial Sequence
  Synthetic oligonucleotide
aattctcctcggcggg

SEQ ID NO: 4922 - DNA, 16 bp, Artificial Sequence
  Synthetic oligonucleotide
aattctcctcggcggg

SEQ ID NO: 4923 - DNA, 16 bp, Artificial Sequence
  Synthetic oligonucleotide
aattctcctcggcggg

SEQ ID NO: 4924 - DNA, 16 bp, Artificial Sequence
  Synthetic oligonucleotide
aattctcctcggcggg

SEQ ID NO: 4925 - DNA, 16 bp, Artificial Sequence
  Synthetic oligonucleotide
aattctcctcggcggg

SEQ ID NO: 4926 - DNA, 16 bp, Artificial Sequence
  Synthetic oligonucleotide
aattctcctcggcggg

SEQ ID NO: 4927 - DNA, 16 bp, Artificial Sequence
  Synthetic oligonucleotide
aattctcctcggcggg

SEQ ID NO: 4928 - DNA, 16 bp, Artificial Sequence
  Synthetic oligonucleotide
aattctcctcggcggg

SEQ ID NO: 4929 - DNA, 16 bp, Artificial Sequence
  Synthetic oligonucleotide
aattctcctcggcggg

SEQ ID NO: 4930 - DNA, 16 bp, Artificial Sequence
  Synthetic oligonucleotide
aattctcctcggcggg

SEQ ID NO: 4931 - DNA, 16 bp, Artificial Sequence
  Synthetic oligonucleotide
aattctcctcggcggg

SEQ ID NO: 4932 - DNA, 16 bp, Artificial Sequence
  Synthetic oligonucleotide
aattctcctcggcggg

SEQ ID NO: 4933 - DNA, 16 bp, Artificial Sequence
  Synthetic oligonucleotide
aattctcctcggcggg

SEQ ID NO: 4934 - DNA, 16 bp, Artificial Sequence
  Synthetic oligonucleotide
aattctcctcggcggg

SEQ ID NO: 4935 - DNA, 16 bp, Artificial Sequence
  Synthetic oligonucleotide
aattctcctcggcggg

SEQ ID NO: 4936 - DNA, 16 bp, Artificial Sequence
  Synthetic oligonucleotide
aattctcctcggcggg

SEQ ID NO: 4937 - DNA, 16 bp, Artificial Sequence
  Synthetic oligonucleotide
aattctcctcggcggg

SEQ ID NO: 4938 - DNA, 16 bp, Artificial Sequence
  Synthetic oligonucleotide
aattctcctcggcggg

SEQ ID NO: 4939 - DNA, 16 bp, Artificial Sequence
  Synthetic oligonucleotide
aattctcctcggcggg

SEQ ID NO: 4940 - DNA, 16 bp, Artificial Sequence
  Synthetic oligonucleotide
aattctcctcggcggg

SEQ ID NO: 4941 - DNA, 16 bp, Artificial Sequence
  Synthetic oligonucleotide
aattctcctcggcggg

SEQ ID NO: 4942 - DNA, 16 bp, Artificial Sequence
  Synthetic oligonucleotide
aattctcctcggcggg

SEQ ID NO: 4943 - DNA, 16 bp, Artificial Sequence
  Synthetic oligonucleotide
aattctcctcggcggg

SEQ ID NO: 4944 - DNA, 16 bp, Artificial Sequence
  Synthetic oligonucleotide
aattctcctcggcggg

SEQ ID NO: 4945 - DNA, 16 bp, Artificial Sequence
  Synthetic oligonucleotide
aattctcctcggcggg

SEQ ID NO: 4946 - DNA, 16 bp, Artificial Sequence
  Synthetic oligonucleotide
aattctcctcggcggg

SEQ ID NO: 4947 - DNA, 16 bp, Artificial Sequence
  Synthetic oligonucleotide
aattctcctcggcggg

SEQ ID NO: 4948 - DNA, 16 bp, Artificial Sequence
  Synthetic oligonucleotide
aattctcctcggcggg

SEQ ID NO: 4949 - DNA, 16 bp, Artificial Sequence
  Synthetic oligonucleotide
aattctcctcggcggg

SEQ ID NO: 4950 - DNA, 16 bp, Artificial Sequence
  Synthetic oligonucleotide
aattctcctcggcggg

SEQ ID NO: 4951 - DNA, 16 bp, Artificial Sequence
  Synthetic oligonucleotide
aattctcctcggcggg

SEQ ID NO: 4952 - DNA, 16 bp, Artificial Sequence
  Synthetic oligonucleotide
aattctcctcggcggg

SEQ ID NO: 4953 - DNA, 16 bp, Artificial Sequence
  Synthetic oligonucleotide
aattctcctcggcggg

SEQ ID NO: 4954 - DNA, 16 bp, Artificial Sequence
  Synthetic oligonucleotide
aattctcctcggcggg

SEQ ID NO: 4955 - DNA, 16 bp, Artificial Sequence
  Synthetic oligonucleotide
aattctcctcggcggg

SEQ ID NO: 4956 - DNA, 16 bp, Artificial Sequence
  Synthetic oligonucleotide
aattctcctcggcggg

SEQ ID NO: 4957 - DNA, 16 bp, Artificial Sequence
  Synthetic oligonucleotide
aattctcctcggcggg

SEQ ID NO: 4958 - DNA, 16 bp, Artificial Sequence
  Synthetic oligonucleotide
aattctcctcggcggg

SEQ ID NO: 4959 - DNA, 16 bp, Artificial Sequence
  Synthetic oligonucleotide
aattctcctcggcggg

SEQ ID NO: 4960 - DNA, 16 bp, Artificial Sequence
  Synthetic oligonucleotide
aattctcctcggcggg

SEQ ID NO: 4961 - DNA, 16 bp, Artificial Sequence
  Synthetic oligonucleotide
aattctcctcggcggg

SEQ ID NO: 4962 - DNA, 16 bp, Artificial Sequence
  Synthetic oligonucleotide
aattctcctcggcggg

SEQ ID NO: 4963 - DNA, 16 bp, Artificial Sequence
  Synthetic oligonucleotide
aattctcctcggcggg

SEQ ID NO: 4964 - DNA, 16 bp, Artificial Sequence
  Synthetic oligonucleotide
aattctcctcggcggg

SEQ ID NO: 4965 - DNA, 16 bp, Artificial Sequence
  Synthetic oligonucleotide
aattctcctcggcggg

SEQ ID NO: 4966 - DNA, 16 bp, Artificial Sequence
  Synthetic oligonucleotide
aattctcctcggcggg

SEQ ID NO: 4967 - DNA, 16 bp, Artificial Sequence
  Synthetic oligonucleotide
aattctcctcggcggg

SEQ ID NO: 4968 - DNA, 14 bp, Artificial Sequence
  Synthetic oligonucleotide
ccgccgaggagaat

SEQ ID NO: 4969 - DNA, 13 bp, Artificial Sequence
  Synthetic oligonucleotide
tgcacaagaaaag

SEQ ID NO: 4970 - DNA, 13 bp, Artificial Sequence
  Synthetic oligonucleotide
tgcacaagaaaag

SEQ ID NO: 4971 - DNA, 13 bp, Artificial Sequence
  Synthetic oligonucleotide
tgcacaagaaaag

SEQ ID NO: 4972 - DNA, 18 bp, Artificial Sequence
  Synthetic oligonucleotide
ctttcctttacaatcata

SEQ ID NO: 4973 - DNA, 18 bp, Artificial Sequence
  Synthetic oligonucleotide
ctttcctttacaatcata

SEQ ID NO: 4974 - DNA, 20 bp, Artificial Sequence
  Synthetic oligonucleotide
tactttcctttacaatcata

SEQ ID NO: 4975 - DNA, 20 bp, Artificial Sequence
  Synthetic oligonucleotide
tactttcctttacaatcata

SEQ ID NO: 4976 - DNA, 17 bp, Artificial Sequence
  Synthetic oligonucleotide
tatggtttccaacccac

SEQ ID NO: 4977 - DNA, 18 bp, Artificial Sequence
  Synthetic oligonucleotide
attacctgtatagattgt

SEQ ID NO: 4978 - DNA, 13 bp, Artificial Sequence
  Synthetic oligonucleotide
ccggtagcacacc

SEQ ID NO: 4979 - DNA, 15 bp, Artificial Sequence
  Synthetic oligonucleotide
ccggtagcacacctt

SEQ ID NO: 4980 - DNA, 18 bp, Artificial Sequence
  Synthetic oligonucleotide
cattcaactcaggacttg

SEQ ID NO: 4981 - DNA, 19 bp, Artificial Sequence
  Synthetic oligonucleotide
tgttctttatcaggatgtt

SEQ ID NO: 4982 - DNA, 16 bp, Artificial Sequence
  Synthetic oligonucleotide
tcagactcagactaat

SEQ ID NO: 4983 - DNA, 18 bp, Artificial Sequence
  Synthetic oligonucleotide
atcagactcagactaatt

SEQ ID NO: 4984 - DNA, 16 bp, Artificial Sequence
  Synthetic oligonucleotide
cagactcagactaatt

SEQ ID NO: 4985 - DNA, 17 bp, Artificial Sequence
  Synthetic oligonucleotide
cagactcagactaattc

SEQ ID NO: 4986 - DNA, 16 bp, Artificial Sequence
  Synthetic oligonucleotide
atcagactcagactaa

SEQ ID NO: 4987 - DNA, 21 bp, Artificial Sequence
  Synthetic oligonucleotide
agttatcagactcagactaat

SEQ ID NO: 4988 - DNA, 16 bp, Artificial Sequence
  Synthetic oligonucleotide
ttgtgcattttggttg

SEQ ID NO: 4989 - DNA, 19 bp, Artificial Sequence
  Synthetic oligonucleotide
aagcttgtgcattttggtt

SEQ ID NO: 4990 - DNA, 16 bp, Artificial Sequence
  Synthetic oligonucleotide
aatcttagggaatttg

SEQ ID NO: 4991 - DNA, 16 bp, Artificial Sequence
  Synthetic oligonucleotide
aatcttagggaatttg

SEQ ID NO: 4992 - DNA, 21 bp, Artificial Sequence
  Synthetic oligonucleotide
cttgctttacatagaagttat

SEQ ID NO: 4993 - DNA, 18 bp, Artificial Sequence
  Synthetic oligonucleotide
acttgctttacatagaag

SEQ ID NO: 4994 - DNA, 18 bp, Artificial Sequence
  Synthetic oligonucleotide
acttgctttacatagaag

SEQ ID NO: 4995 - DNA, 18 bp, Artificial Sequence
  Synthetic oligonucleotide
acttgctttacatagaag

SEQ ID NO: 4996 - DNA, 18 bp, Artificial Sequence
  Synthetic oligonucleotide
acttgctttacatagaag

SEQ ID NO: 4997 - DNA, 18 bp, Artificial Sequence
  Synthetic oligonucleotide
acttgctttacatagaag

SEQ ID NO: 4998 - DNA, 18 bp, Artificial Sequence
  Synthetic oligonucleotide
acttgctttacatagaag

SEQ ID NO: 4999 - DNA, 18 bp, Artificial Sequence
  Synthetic oligonucleotide
acttgctttacatagaag

SEQ ID NO: 5000 - DNA, 18 bp, Artificial Sequence
  Synthetic oligonucleotide
acttgctttacatagaag

SEQ ID NO: 5001 - DNA, 18 bp, Artificial Sequence
  Synthetic oligonucleotide
acttgctttacatagaag

SEQ ID NO: 5002 - DNA, 18 bp, Artificial Sequence
  Synthetic oligonucleotide
acttgctttacatagaag

SEQ ID NO: 5003 - DNA, 18 bp, Artificial Sequence
  Synthetic oligonucleotide
acttgctttacatagaag

SEQ ID NO: 5004 - DNA, 18 bp, Artificial Sequence
  Synthetic oligonucleotide
acttgctttacatagaag

SEQ ID NO: 5005 - DNA, 18 bp, Artificial Sequence
  Synthetic oligonucleotide
acttgctttacatagaag

SEQ ID NO: 5006 - DNA, 18 bp, Artificial Sequence
  Synthetic oligonucleotide
acttgctttacatagaag

SEQ ID NO: 5007 - DNA, 18 bp, Artificial Sequence
  Synthetic oligonucleotide
acttgctttacatagaag

SEQ ID NO: 5008 - DNA, 18 bp, Artificial Sequence
  Synthetic oligonucleotide
acttgctttacatagaag

SEQ ID NO: 5009 - DNA, 18 bp, Artificial Sequence
  Synthetic oligonucleotide
acttgctttacatagaag

SEQ ID NO: 5010 - DNA, 18 bp, Artificial Sequence
  Synthetic oligonucleotide
acttgctttacatagaag

SEQ ID NO: 5011 - DNA, 18 bp, Artificial Sequence
  Synthetic oligonucleotide
acttgctttacatagaag

SEQ ID NO: 5012 - DNA, 18 bp, Artificial Sequence
  Synthetic oligonucleotide
acttgctttacatagaag

SEQ ID NO: 5013 - DNA, 18 bp, Artificial Sequence
  Synthetic oligonucleotide
acttgctttacatagaag

SEQ ID NO: 5014 - DNA, 18 bp, Artificial Sequence
  Synthetic oligonucleotide
acttgctttacatagaag

SEQ ID NO: 5015 - DNA, 18 bp, Artificial Sequence
  Synthetic oligonucleotide
acttgctttacatagaag

SEQ ID NO: 5016 - DNA, 18 bp, Artificial Sequence
  Synthetic oligonucleotide
acttgctttacatagaag

SEQ ID NO: 5017 - DNA, 18 bp, Artificial Sequence
  Synthetic oligonucleotide
acttgctttacatagaag

SEQ ID NO: 5018 - DNA, 18 bp, Artificial Sequence
  Synthetic oligonucleotide
acttgctttacatagaag

SEQ ID NO: 5019 - DNA, 18 bp, Artificial Sequence
  Synthetic oligonucleotide
acttgctttacatagaag

SEQ ID NO: 5020 - DNA, 18 bp, Artificial Sequence
  Synthetic oligonucleotide
acttgctttacatagaag

SEQ ID NO: 5021 - DNA, 18 bp, Artificial Sequence
  Synthetic oligonucleotide
acttgctttacatagaag

SEQ ID NO: 5022 - DNA, 18 bp, Artificial Sequence
  Synthetic oligonucleotide
acttgctttacatagaag

SEQ ID NO: 5023 - DNA, 18 bp, Artificial Sequence
  Synthetic oligonucleotide
acttgctttacatagaag

SEQ ID NO: 5024 - DNA, 18 bp, Artificial Sequence
  Synthetic oligonucleotide
acttgctttacatagaag

SEQ ID NO: 5025 - DNA, 18 bp, Artificial Sequence
  Synthetic oligonucleotide
acttgctttacatagaag

SEQ ID NO: 5026 - DNA, 18 bp, Artificial Sequence
  Synthetic oligonucleotide
acttgctttacatagaag

SEQ ID NO: 5027 - DNA, 18 bp, Artificial Sequence
  Synthetic oligonucleotide
acttgctttacatagaag

SEQ ID NO: 5028 - DNA, 18 bp, Artificial Sequence
  Synthetic oligonucleotide
acttgctttacatagaag

SEQ ID NO: 5029 - DNA, 18 bp, Artificial Sequence
  Synthetic oligonucleotide
acttgctttacatagaag

SEQ ID NO: 5030 - DNA, 18 bp, Artificial Sequence
  Synthetic oligonucleotide
acttgctttacatagaag

SEQ ID NO: 5031 - DNA, 18 bp, Artificial Sequence
  Synthetic oligonucleotide
acttgctttacatagaag

SEQ ID NO: 5032 - DNA, 18 bp, Artificial Sequence
  Synthetic oligonucleotide
acttgctttacatagaag

SEQ ID NO: 5033 - DNA, 18 bp, Artificial Sequence
  Synthetic oligonucleotide
acttgctttacatagaag

SEQ ID NO: 5034 - DNA, 18 bp, Artificial Sequence
  Synthetic oligonucleotide
acttgctttacatagaag

SEQ ID NO: 5035 - DNA, 18 bp, Artificial Sequence
  Synthetic oligonucleotide
acttgctttacatagaag

SEQ ID NO: 5036 - DNA, 18 bp, Artificial Sequence
  Synthetic oligonucleotide
acttgctttacatagaag

SEQ ID NO: 5037 - DNA, 18 bp, Artificial Sequence
  Synthetic oligonucleotide
acttgctttacatagaag

SEQ ID NO: 5038 - DNA, 18 bp, Artificial Sequence
  Synthetic oligonucleotide
acttgctttacatagaag

SEQ ID NO: 5039 - DNA, 18 bp, Artificial Sequence
  Synthetic oligonucleotide
acttgctttacatagaag

SEQ ID NO: 5040 - DNA, 18 bp, Artificial Sequence
  Synthetic oligonucleotide
acttgctttacatagaag

SEQ ID NO: 5041 - DNA, 18 bp, Artificial Sequence
  Synthetic oligonucleotide
acttgctttacatagaag

SEQ ID NO: 5042 - DNA, 18 bp, Artificial Sequence
  Synthetic oligonucleotide
acttgctttacatagaag

SEQ ID NO: 5043 - DNA, 18 bp, Artificial Sequence
  Synthetic oligonucleotide
acttgctttacatagaag

SEQ ID NO: 5044 - DNA, 18 bp, Artificial Sequence
  Synthetic oligonucleotide
acttgctttacatagaag

SEQ ID NO: 5045 - DNA, 18 bp, Artificial Sequence
  Synthetic oligonucleotide
acttgctttacatagaag

SEQ ID NO: 5046 - DNA, 18 bp, Artificial Sequence
  Synthetic oligonucleotide
acttgctttacatagaag

SEQ ID NO: 5047 - DNA, 18 bp, Artificial Sequence
  Synthetic oligonucleotide
acttgctttacatagaag

SEQ ID NO: 5048 - DNA, 18 bp, Artificial Sequence
  Synthetic oligonucleotide
acttgctttacatagaag

SEQ ID NO: 5049 - DNA, 18 bp, Artificial Sequence
  Synthetic oligonucleotide
acttgctttacatagaag

SEQ ID NO: 5050 - DNA, 13 bp, Artificial Sequence
  Synthetic oligonucleotide
caccagatttgca

SEQ ID NO: 5051 - DNA, 13 bp, Artificial Sequence
  Synthetic oligonucleotide
caccagatttgca

SEQ ID NO: 5052 - DNA, 18 bp, Artificial Sequence
  Synthetic oligonucleotide
acacactgactagagact

SEQ ID NO: 5053 - DNA, 16 bp, Artificial Sequence
  Synthetic oligonucleotide
aattccgcatcatttt

SEQ ID NO: 5054 - DNA, 15 bp, Artificial Sequence
  Synthetic oligonucleotide
ccggtagcacacctt

SEQ ID NO: 5055 - DNA, 13 bp, Artificial Sequence
  Synthetic oligonucleotide
ccggtagcacacc

SEQ ID NO: 5056 - DNA, 18 bp, Artificial Sequence
  Synthetic oligonucleotide
ctttatcaggatgttaac

SEQ ID NO: 5057 - DNA, 22 bp, Artificial Sequence
  Synthetic oligonucleotide
tgttctttatcaggatgttaac

SEQ ID NO: 5058 - DNA, 19 bp, Artificial Sequence
  Synthetic oligonucleotide
caatctatacaggtaatta

SEQ ID NO: 5059 - DNA, 23 bp, Artificial Sequence
  Synthetic oligonucleotide
ctaaacaatctatacaggtaatt

SEQ ID NO: 5060 - DNA, 15 bp, Artificial Sequence
  Synthetic oligonucleotide
ccggtagcacacctt

SEQ ID NO: 5061 - DNA, 13 bp, Artificial Sequence
  Synthetic oligonucleotide
ccggtagcacacc

SEQ ID NO: 5062 - DNA, 18 bp, Artificial Sequence
  Synthetic oligonucleotide
ttcctttacaatcatatg

SEQ ID NO: 5063 - DNA, 16 bp, Artificial Sequence
  Synthetic oligonucleotide
caagacgtgaaaggat

SEQ ID NO: 5064 - DNA, 18 bp, Artificial Sequence
  Synthetic oligonucleotide
atatcctttcacgtcttg

SEQ ID NO: 5065 - DNA, 18 bp, Artificial Sequence
  Synthetic oligonucleotide
atatcctttcacgtcttg

SEQ ID NO: 5066 - DNA, 18 bp, Artificial Sequence
  Synthetic oligonucleotide
atatcctttcacgtcttg

SEQ ID NO: 5067 - DNA, 18 bp, Artificial Sequence
  Synthetic oligonucleotide
atatcctttcacgtcttg

SEQ ID NO: 5068 - DNA, 18 bp, Artificial Sequence
  Synthetic oligonucleotide
atatcctttcacgtcttg

SEQ ID NO: 5069 - DNA, 18 bp, Artificial Sequence
  Synthetic oligonucleotide
atatcctttcacgtcttg

SEQ ID NO: 5070 - DNA, 18 bp, Artificial Sequence
  Synthetic oligonucleotide
atatcctttcacgtcttg

SEQ ID NO: 5071 - DNA, 18 bp, Artificial Sequence
  Synthetic oligonucleotide
atatcctttcacgtcttg

SEQ ID NO: 5072 - DNA, 18 bp, Artificial Sequence
  Synthetic oligonucleotide
atatcctttcacgtcttg

SEQ ID NO: 5073 - DNA, 18 bp, Artificial Sequence
  Synthetic oligonucleotide
atatcctttcacgtcttg

SEQ ID NO: 5074 - DNA, 18 bp, Artificial Sequence
  Synthetic oligonucleotide
atatcctttcacgtcttg

SEQ ID NO: 5075 - DNA, 18 bp, Artificial Sequence
  Synthetic oligonucleotide
atatcctttcacgtcttg

SEQ ID NO: 5076 - DNA, 18 bp, Artificial Sequence
  Synthetic oligonucleotide
atatcctttcacgtcttg

SEQ ID NO: 5077 - DNA, 18 bp, Artificial Sequence
  Synthetic oligonucleotide
atatcctttcacgtcttg

SEQ ID NO: 5078 - DNA, 18 bp, Artificial Sequence
  Synthetic oligonucleotide
atatcctttcacgtcttg

SEQ ID NO: 5079 - DNA, 18 bp, Artificial Sequence
  Synthetic oligonucleotide
atatcctttcacgtcttg

SEQ ID NO: 5080 - DNA, 18 bp, Artificial Sequence
  Synthetic oligonucleotide
atatcctttcacgtcttg

SEQ ID NO: 5081 - DNA, 18 bp, Artificial Sequence
  Synthetic oligonucleotide
atatcctttcacgtcttg

SEQ ID NO: 5082 - DNA, 18 bp, Artificial Sequence
  Synthetic oligonucleotide
atatcctttcacgtcttg

SEQ ID NO: 5083 - DNA, 18 bp, Artificial Sequence
  Synthetic oligonucleotide
atatcctttcacgtcttg

SEQ ID NO: 5084 - DNA, 18 bp, Artificial Sequence
  Synthetic oligonucleotide
atatcctttcacgtcttg

SEQ ID NO: 5085 - DNA, 18 bp, Artificial Sequence
  Synthetic oligonucleotide
atatcctttcacgtcttg

SEQ ID NO: 5086 - DNA, 18 bp, Artificial Sequence
  Synthetic oligonucleotide
atatcctttcacgtcttg

SEQ ID NO: 5087 - DNA, 18 bp, Artificial Sequence
  Synthetic oligonucleotide
atatcctttcacgtcttg

SEQ ID NO: 5088 - DNA, 18 bp, Artificial Sequence
  Synthetic oligonucleotide
atatcctttcacgtcttg

SEQ ID NO: 5089 - DNA, 18 bp, Artificial Sequence
  Synthetic oligonucleotide
atatcctttcacgtcttg

SEQ ID NO: 5090 - DNA, 18 bp, Artificial Sequence
  Synthetic oligonucleotide
atatcctttcacgtcttg

SEQ ID NO: 5091 - DNA, 18 bp, Artificial Sequence
  Synthetic oligonucleotide
atatcctttcacgtcttg

SEQ ID NO: 5092 - DNA, 18 bp, Artificial Sequence
  Synthetic oligonucleotide
atatcctttcacgtcttg

SEQ ID NO: 5093 - DNA, 18 bp, Artificial Sequence
  Synthetic oligonucleotide
atatcctttcacgtcttg

SEQ ID NO: 5094 - DNA, 18 bp, Artificial Sequence
  Synthetic oligonucleotide
atatcctttcacgtcttg

SEQ ID NO: 5095 - DNA, 18 bp, Artificial Sequence
  Synthetic oligonucleotide
atatcctttcacgtcttg

SEQ ID NO: 5096 - DNA, 18 bp, Artificial Sequence
  Synthetic oligonucleotide
atatcctttcacgtcttg

SEQ ID NO: 5097 - DNA, 18 bp, Artificial Sequence
  Synthetic oligonucleotide
atatcctttcacgtcttg

SEQ ID NO: 5098 - DNA, 18 bp, Artificial Sequence
  Synthetic oligonucleotide
atatcctttcacgtcttg

SEQ ID NO: 5099 - DNA, 18 bp, Artificial Sequence
  Synthetic oligonucleotide
atatcctttcacgtcttg

SEQ ID NO: 5100 - DNA, 18 bp, Artificial Sequence
  Synthetic oligonucleotide
atatcctttcacgtcttg

SEQ ID NO: 5101 - DNA, 18 bp, Artificial Sequence
  Synthetic oligonucleotide
atatcctttcacgtcttg

SEQ ID NO: 5102 - DNA, 18 bp, Artificial Sequence
  Synthetic oligonucleotide
atatcctttcacgtcttg

SEQ ID NO: 5103 - DNA, 18 bp, Artificial Sequence
  Synthetic oligonucleotide
atatcctttcacgtcttg

SEQ ID NO: 5104 - DNA, 18 bp, Artificial Sequence
  Synthetic oligonucleotide
atatcctttcacgtcttg

SEQ ID NO: 5105 - DNA, 18 bp, Artificial Sequence
  Synthetic oligonucleotide
atatcctttcacgtcttg

SEQ ID NO: 5106 - DNA, 18 bp, Artificial Sequence
  Synthetic oligonucleotide
atatcctttcacgtcttg

SEQ ID NO: 5107 - DNA, 18 bp, Artificial Sequence
  Synthetic oligonucleotide
atatcctttcacgtcttg

SEQ ID NO: 5108 - DNA, 18 bp, Artificial Sequence
  Synthetic oligonucleotide
atatcctttcacgtcttg

SEQ ID NO: 5109 - DNA, 18 bp, Artificial Sequence
  Synthetic oligonucleotide
atatcctttcacgtcttg

SEQ ID NO: 5110 - DNA, 18 bp, Artificial Sequence
  Synthetic oligonucleotide
atatcctttcacgtcttg

SEQ ID NO: 5111 - DNA, 18 bp, Artificial Sequence
  Synthetic oligonucleotide
atatcctttcacgtcttg

SEQ ID NO: 5112 - DNA, 18 bp, Artificial Sequence
  Synthetic oligonucleotide
atatcctttcacgtcttg

SEQ ID NO: 5113 - DNA, 18 bp, Artificial Sequence
  Synthetic oligonucleotide
atatcctttcacgtcttg

SEQ ID NO: 5114 - DNA, 18 bp, Artificial Sequence
  Synthetic oligonucleotide
atatcctttcacgtcttg

SEQ ID NO: 5115 - DNA, 18 bp, Artificial Sequence
  Synthetic oligonucleotide
atatcctttcacgtcttg

SEQ ID NO: 5116 - DNA, 18 bp, Artificial Sequence
  Synthetic oligonucleotide
atatcctttcacgtcttg

SEQ ID NO: 5117 - DNA, 18 bp, Artificial Sequence
  Synthetic oligonucleotide
atatcctttcacgtcttg

SEQ ID NO: 5118 - DNA, 18 bp, Artificial Sequence
  Synthetic oligonucleotide
atatcctttcacgtcttg

SEQ ID NO: 5119 - DNA, 18 bp, Artificial Sequence
  Synthetic oligonucleotide
atatcctttcacgtcttg

SEQ ID NO: 5120 - DNA, 18 bp, Artificial Sequence
  Synthetic oligonucleotide
atatcctttcacgtcttg

SEQ ID NO: 5121 - DNA, 18 bp, Artificial Sequence
  Synthetic oligonucleotide
atatcctttcacgtcttg

SEQ ID NO: 5122 - DNA, 18 bp, Artificial Sequence
  Synthetic oligonucleotide
atatcctttcacgtcttg

SEQ ID NO: 5123 - DNA, 18 bp, Artificial Sequence
  Synthetic oligonucleotide
atatcctttcacgtcttg

SEQ ID NO: 5124 - DNA, 18 bp, Artificial Sequence
  Synthetic oligonucleotide
atatcctttcacgtcttg

SEQ ID NO: 5125 - DNA, 18 bp, Artificial Sequence
  Synthetic oligonucleotide
atatcctttcacgtcttg

SEQ ID NO: 5126 - DNA, 18 bp, Artificial Sequence
  Synthetic oligonucleotide
atatcctttcacgtcttg

SEQ ID NO: 5127 - DNA, 18 bp, Artificial Sequence
  Synthetic oligonucleotide
atatcctttcacgtcttg

SEQ ID NO: 5128 - DNA, 18 bp, Artificial Sequence
  Synthetic oligonucleotide
atatcctttcacgtcttg

SEQ ID NO: 5129 - DNA, 18 bp, Artificial Sequence
  Synthetic oligonucleotide
atatcctttcacgtcttg

SEQ ID NO: 5130 - DNA, 18 bp, Artificial Sequence
  Synthetic oligonucleotide
atatcctttcacgtcttg

SEQ ID NO: 5131 - DNA, 18 bp, Artificial Sequence
  Synthetic oligonucleotide
atatcctttcacgtcttg

SEQ ID NO: 5132 - DNA, 18 bp, Artificial Sequence
  Synthetic oligonucleotide
atatcctttcacgtcttg

SEQ ID NO: 5133 - DNA, 18 bp, Artificial Sequence
  Synthetic oligonucleotide
atatcctttcacgtcttg

SEQ ID NO: 5134 - DNA, 18 bp, Artificial Sequence
  Synthetic oligonucleotide
atatcctttcacgtcttg

SEQ ID NO: 5135 - DNA, 18 bp, Artificial Sequence
  Synthetic oligonucleotide
atatcctttcacgtcttg

SEQ ID NO: 5136 - DNA, 18 bp, Artificial Sequence
  Synthetic oligonucleotide
atatcctttcacgtcttg

SEQ ID NO: 5137 - DNA, 18 bp, Artificial Sequence
  Synthetic oligonucleotide
atatcctttcacgtcttg

SEQ ID NO: 5138 - DNA, 18 bp, Artificial Sequence
  Synthetic oligonucleotide
atatcctttcacgtcttg

SEQ ID NO: 5139 - DNA, 18 bp, Artificial Sequence
  Synthetic oligonucleotide
atatcctttcacgtcttg

SEQ ID NO: 5140 - DNA, 18 bp, Artificial Sequence
  Synthetic oligonucleotide
atatcctttcacgtcttg

SEQ ID NO: 5141 - DNA, 18 bp, Artificial Sequence
  Synthetic oligonucleotide
atatcctttcacgtcttg

SEQ ID NO: 5142 - DNA, 18 bp, Artificial Sequence
  Synthetic oligonucleotide
atatcctttcacgtcttg

SEQ ID NO: 5143 - DNA, 18 bp, Artificial Sequence
  Synthetic oligonucleotide
atatcctttcacgtcttg

SEQ ID NO: 5144 - DNA, 18 bp, Artificial Sequence
  Synthetic oligonucleotide
atatcctttcacgtcttg

SEQ ID NO: 5145 - DNA, 18 bp, Artificial Sequence
  Synthetic oligonucleotide
atatcctttcacgtcttg

SEQ ID NO: 5146 - DNA, 18 bp, Artificial Sequence
  Synthetic oligonucleotide
atatcctttcacgtcttg

SEQ ID NO: 5147 - DNA, 18 bp, Artificial Sequence
  Synthetic oligonucleotide
atatcctttcacgtcttg

SEQ ID NO: 5148 - DNA, 18 bp, Artificial Sequence
  Synthetic oligonucleotide
atatcctttcacgtcttg

SEQ ID NO: 5149 - DNA, 18 bp, Artificial Sequence
  Synthetic oligonucleotide
atatcctttcacgtcttg

SEQ ID NO: 5150 - DNA, 18 bp, Artificial Sequence
  Synthetic oligonucleotide
atatcctttcacgtcttg

SEQ ID NO: 5151 - DNA, 18 bp, Artificial Sequence
  Synthetic oligonucleotide
atatcctttcacgtcttg

SEQ ID NO: 5152 - DNA, 18 bp, Artificial Sequence
  Synthetic oligonucleotide
atatcctttcacgtcttg

SEQ ID NO: 5153 - DNA, 18 bp, Artificial Sequence
  Synthetic oligonucleotide
atatcctttcacgtcttg

SEQ ID NO: 5154 - DNA, 18 bp, Artificial Sequence
  Synthetic oligonucleotide
atatcctttcacgtcttg

SEQ ID NO: 5155 - DNA, 18 bp, Artificial Sequence
  Synthetic oligonucleotide
atatcctttcacgtcttg

SEQ ID NO: 5156 - DNA, 18 bp, Artificial Sequence
  Synthetic oligonucleotide
atatcctttcacgtcttg

SEQ ID NO: 5157 - DNA, 18 bp, Artificial Sequence
  Synthetic oligonucleotide
atatcctttcacgtcttg

SEQ ID NO: 5158 - DNA, 18 bp, Artificial Sequence
  Synthetic oligonucleotide
atatcctttcacgtcttg

SEQ ID NO: 5159 - DNA, 18 bp, Artificial Sequence
  Synthetic oligonucleotide
atatcctttcacgtcttg

SEQ ID NO: 5160 - DNA, 18 bp, Artificial Sequence
  Synthetic oligonucleotide
atatcctttcacgtcttg

SEQ ID NO: 5161 - DNA, 18 bp, Artificial Sequence
  Synthetic oligonucleotide
atatcctttcacgtcttg

SEQ ID NO: 5162 - DNA, 18 bp, Artificial Sequence
  Synthetic oligonucleotide
atatcctttcacgtcttg

SEQ ID NO: 5163 - DNA, 18 bp, Artificial Sequence
  Synthetic oligonucleotide
atatcctttcacgtcttg

SEQ ID NO: 5164 - DNA, 18 bp, Artificial Sequence
  Synthetic oligonucleotide
atatcctttcacgtcttg

SEQ ID NO: 5165 - DNA, 18 bp, Artificial Sequence
  Synthetic oligonucleotide
atatcctttcacgtcttg

SEQ ID NO: 5166 - DNA, 18 bp, Artificial Sequence
  Synthetic oligonucleotide
atatcctttcacgtcttg

SEQ ID NO: 5167 - DNA, 18 bp, Artificial Sequence
  Synthetic oligonucleotide
atatcctttcacgtcttg

SEQ ID NO: 5168 - DNA, 18 bp, Artificial Sequence
  Synthetic oligonucleotide
atatcctttcacgtcttg

SEQ ID NO: 5169 - DNA, 18 bp, Artificial Sequence
  Synthetic oligonucleotide
atatcctttcacgtcttg

SEQ ID NO: 5170 - DNA, 18 bp, Artificial Sequence
  Synthetic oligonucleotide
atatcctttcacgtcttg

SEQ ID NO: 5171 - DNA, 18 bp, Artificial Sequence
  Synthetic oligonucleotide
atatcctttcacgtcttg

SEQ ID NO: 5172 - DNA, 18 bp, Artificial Sequence
  Synthetic oligonucleotide
atatcctttcacgtcttg

SEQ ID NO: 5173 - DNA, 18 bp, Artificial Sequence
  Synthetic oligonucleotide
atatcctttcacgtcttg

SEQ ID NO: 5174 - DNA, 18 bp, Artificial Sequence
  Synthetic oligonucleotide
atatcctttcacgtcttg

SEQ ID NO: 5175 - DNA, 18 bp, Artificial Sequence
  Synthetic oligonucleotide
atatcctttcacgtcttg

SEQ ID NO: 5176 - DNA, 18 bp, Artificial Sequence
  Synthetic oligonucleotide
atatcctttcacgtcttg

SEQ ID NO: 5177 - DNA, 18 bp, Artificial Sequence
  Synthetic oligonucleotide
atatcctttcacgtcttg

SEQ ID NO: 5178 - DNA, 18 bp, Artificial Sequence
  Synthetic oligonucleotide
atatcctttcacgtcttg

SEQ ID NO: 5179 - DNA, 18 bp, Artificial Sequence
  Synthetic oligonucleotide
atatcctttcacgtcttg

SEQ ID NO: 5180 - DNA, 18 bp, Artificial Sequence
  Synthetic oligonucleotide
atatcctttcacgtcttg

SEQ ID NO: 5181 - DNA, 18 bp, Artificial Sequence
  Synthetic oligonucleotide
atatcctttcacgtcttg

SEQ ID NO: 5182 - DNA, 18 bp, Artificial Sequence
  Synthetic oligonucleotide
atatcctttcacgtcttg

SEQ ID NO: 5183 - DNA, 18 bp, Artificial Sequence
  Synthetic oligonucleotide
atatcctttcacgtcttg

SEQ ID NO: 5184 - DNA, 18 bp, Artificial Sequence
  Synthetic oligonucleotide
atatcctttcacgtcttg

SEQ ID NO: 5185 - DNA, 18 bp, Artificial Sequence
  Synthetic oligonucleotide
atatcctttcacgtcttg

SEQ ID NO: 5186 - DNA, 18 bp, Artificial Sequence
  Synthetic oligonucleotide
atatcctttcacgtcttg

SEQ ID NO: 5187 - DNA, 16 bp, Artificial Sequence
  Synthetic oligonucleotide
caaggtgtgctaccgg

SEQ ID NO: 5188 - DNA, 16 bp, Artificial Sequence
  Synthetic oligonucleotide
ttctggttgtaagatt

SEQ ID NO: 5189 - DNA, 16 bp, Artificial Sequence
  Synthetic oligonucleotide
ttctggttgtaagatt

SEQ ID NO: 5190 - DNA, 18 bp, Artificial Sequence
  Synthetic oligonucleotide
ttgagttctggttgtaag

SEQ ID NO: 5191 - DNA, 20 bp, Artificial Sequence
  Synthetic oligonucleotide
ttgagttctggttgtaagat

SEQ ID NO: 5192 - DNA, 19 bp, Artificial Sequence
  Synthetic oligonucleotide
ccattacaaggtgtgctac

SEQ ID NO: 5193 - DNA, 15 bp, Artificial Sequence
  Synthetic oligonucleotide
acaaggtgtgctacc

SEQ ID NO: 5194 - DNA, 15 bp, Artificial Sequence
  Synthetic oligonucleotide
acaaggtgtgctacc

SEQ ID NO: 5195 - DNA, 17 bp, Artificial Sequence
  Synthetic oligonucleotide
ccattacaaggtgtgct

SEQ ID NO: 5196 - DNA, 15 bp, Artificial Sequence
  Synthetic oligonucleotide
ctgtgcctgttaaac

SEQ ID NO: 5197 - DNA, 15 bp, Artificial Sequence
  Synthetic oligonucleotide
atacccacaaatttt

SEQ ID NO: 5198 - DNA, 14 bp, Artificial Sequence
  Synthetic oligonucleotide
atacccacaaattt

SEQ ID NO: 5199 - DNA, 14 bp, Artificial Sequence
  Synthetic oligonucleotide
atacccacaaattt

SEQ ID NO: 5200 - DNA, 13 bp, Artificial Sequence
  Synthetic oligonucleotide
atacccacaaatt

SEQ ID NO: 5201 - DNA, 15 bp, Artificial Sequence
  Synthetic oligonucleotide
taaaatttgtgggta

SEQ ID NO: 5202 - DNA, 18 bp, Artificial Sequence
  Synthetic oligonucleotide
tagtaaaatttgtgggta

SEQ ID NO: 5203 - DNA, 14 bp, Artificial Sequence
  Synthetic oligonucleotide
tacccacaaatttt

SEQ ID NO: 5204 - DNA, 12 bp, Artificial Sequence
  Synthetic oligonucleotide
acccacaaattt

SEQ ID NO: 5205 - DNA, 12 bp, Artificial Sequence
  Synthetic oligonucleotide
acccacaaattt

SEQ ID NO: 5206 - DNA, 12 bp, Artificial Sequence
  Synthetic oligonucleotide
acccacaaattt

SEQ ID NO: 5207 - DNA, 12 bp, Artificial Sequence
  Synthetic oligonucleotide
acccacaaattt

SEQ ID NO: 5208 - DNA, 12 bp, Artificial Sequence
  Synthetic oligonucleotide
acccacaaattt

SEQ ID NO: 5209 - DNA, 12 bp, Artificial Sequence
  Synthetic oligonucleotide
acccacaaattt

SEQ ID NO: 5210 - DNA, 12 bp, Artificial Sequence
  Synthetic oligonucleotide
acccacaaattt

SEQ ID NO: 5211 - DNA, 12 bp, Artificial Sequence
  Synthetic oligonucleotide
acccacaaattt

SEQ ID NO: 5212 - DNA, 12 bp, Artificial Sequence
  Synthetic oligonucleotide
acccacaaattt

SEQ ID NO: 5213 - DNA, 12 bp, Artificial Sequence
  Synthetic oligonucleotide
acccacaaattt

SEQ ID NO: 5214 - DNA, 12 bp, Artificial Sequence
  Synthetic oligonucleotide
acccacaaattt

SEQ ID NO: 5215 - DNA, 12 bp, Artificial Sequence
  Synthetic oligonucleotide
acccacaaattt

SEQ ID NO: 5216 - DNA, 12 bp, Artificial Sequence
  Synthetic oligonucleotide
acccacaaattt

SEQ ID NO: 5217 - DNA, 12 bp, Artificial Sequence
  Synthetic oligonucleotide
acccacaaattt

SEQ ID NO: 5218 - DNA, 12 bp, Artificial Sequence
  Synthetic oligonucleotide
acccacaaattt

SEQ ID NO: 5219 - DNA, 12 bp, Artificial Sequence
  Synthetic oligonucleotide
acccacaaattt

SEQ ID NO: 5220 - DNA, 12 bp, Artificial Sequence
  Synthetic oligonucleotide
acccacaaattt

SEQ ID NO: 5221 - DNA, 12 bp, Artificial Sequence
  Synthetic oligonucleotide
acccacaaattt

SEQ ID NO: 5222 - DNA, 12 bp, Artificial Sequence
  Synthetic oligonucleotide
acccacaaattt

SEQ ID NO: 5223 - DNA, 12 bp, Artificial Sequence
  Synthetic oligonucleotide
acccacaaattt

SEQ ID NO: 5224 - DNA, 12 bp, Artificial Sequence
  Synthetic oligonucleotide
acccacaaattt

SEQ ID NO: 5225 - DNA, 12 bp, Artificial Sequence
  Synthetic oligonucleotide
acccacaaattt

SEQ ID NO: 5226 - DNA, 12 bp, Artificial Sequence
  Synthetic oligonucleotide
acccacaaattt

SEQ ID NO: 5227 - DNA, 12 bp, Artificial Sequence
  Synthetic oligonucleotide
acccacaaattt

SEQ ID NO: 5228 - DNA, 12 bp, Artificial Sequence
  Synthetic oligonucleotide
acccacaaattt

SEQ ID NO: 5229 - DNA, 12 bp, Artificial Sequence
  Synthetic oligonucleotide
acccacaaattt

SEQ ID NO: 5230 - DNA, 12 bp, Artificial Sequence
  Synthetic oligonucleotide
acccacaaattt

SEQ ID NO: 5231 - DNA, 12 bp, Artificial Sequence
  Synthetic oligonucleotide
acccacaaattt

SEQ ID NO: 5232 - DNA, 12 bp, Artificial Sequence
  Synthetic oligonucleotide
acccacaaattt

SEQ ID NO: 5233 - DNA, 12 bp, Artificial Sequence
  Synthetic oligonucleotide
acccacaaattt

SEQ ID NO: 5234 - DNA, 12 bp, Artificial Sequence
  Synthetic oligonucleotide
acccacaaattt

SEQ ID NO: 5235 - DNA, 12 bp, Artificial Sequence
  Synthetic oligonucleotide
acccacaaattt

SEQ ID NO: 5236 - DNA, 12 bp, Artificial Sequence
  Synthetic oligonucleotide
acccacaaattt

SEQ ID NO: 5237 - DNA, 12 bp, Artificial Sequence
  Synthetic oligonucleotide
acccacaaattt

SEQ ID NO: 5238 - DNA, 12 bp, Artificial Sequence
  Synthetic oligonucleotide
acccacaaattt

SEQ ID NO: 5239 - DNA, 12 bp, Artificial Sequence
  Synthetic oligonucleotide
acccacaaattt

SEQ ID NO: 5240 - DNA, 12 bp, Artificial Sequence
  Synthetic oligonucleotide
acccacaaattt

SEQ ID NO: 5241 - DNA, 12 bp, Artificial Sequence
  Synthetic oligonucleotide
acccacaaattt

SEQ ID NO: 5242 - DNA, 12 bp, Artificial Sequence
  Synthetic oligonucleotide
acccacaaattt

SEQ ID NO: 5243 - DNA, 12 bp, Artificial Sequence
  Synthetic oligonucleotide
acccacaaattt

SEQ ID NO: 5244 - DNA, 12 bp, Artificial Sequence
  Synthetic oligonucleotide
acccacaaattt

SEQ ID NO: 5245 - DNA, 12 bp, Artificial Sequence
  Synthetic oligonucleotide
acccacaaattt

SEQ ID NO: 5246 - DNA, 12 bp, Artificial Sequence
  Synthetic oligonucleotide
acccacaaattt

SEQ ID NO: 5247 - DNA, 12 bp, Artificial Sequence
  Synthetic oligonucleotide
acccacaaattt

SEQ ID NO: 5248 - DNA, 12 bp, Artificial Sequence
  Synthetic oligonucleotide
acccacaaattt

SEQ ID NO: 5249 - DNA, 12 bp, Artificial Sequence
  Synthetic oligonucleotide
acccacaaattt

SEQ ID NO: 5250 - DNA, 12 bp, Artificial Sequence
  Synthetic oligonucleotide
acccacaaattt

SEQ ID NO: 5251 - DNA, 12 bp, Artificial Sequence
  Synthetic oligonucleotide
acccacaaattt

SEQ ID NO: 5252 - DNA, 12 bp, Artificial Sequence
  Synthetic oligonucleotide
acccacaaattt

SEQ ID NO: 5253 - DNA, 12 bp, Artificial Sequence
  Synthetic oligonucleotide
acccacaaattt

SEQ ID NO: 5254 - DNA, 12 bp, Artificial Sequence
  Synthetic oligonucleotide
acccacaaattt

SEQ ID NO: 5255 - DNA, 12 bp, Artificial Sequence
  Synthetic oligonucleotide
acccacaaattt

SEQ ID NO: 5256 - DNA, 12 bp, Artificial Sequence
  Synthetic oligonucleotide
acccacaaattt

SEQ ID NO: 5257 - DNA, 12 bp, Artificial Sequence
  Synthetic oligonucleotide
acccacaaattt

SEQ ID NO: 5258 - DNA, 12 bp, Artificial Sequence
  Synthetic oligonucleotide
acccacaaattt

SEQ ID NO: 5259 - DNA, 12 bp, Artificial Sequence
  Synthetic oligonucleotide
acccacaaattt

SEQ ID NO: 5260 - DNA, 12 bp, Artificial Sequence
  Synthetic oligonucleotide
acccacaaattt

SEQ ID NO: 5261 - DNA, 12 bp, Artificial Sequence
  Synthetic oligonucleotide
acccacaaattt

SEQ ID NO: 5262 - DNA, 12 bp, Artificial Sequence
  Synthetic oligonucleotide
acccacaaattt

SEQ ID NO: 5263 - DNA, 12 bp, Artificial Sequence
  Synthetic oligonucleotide
acccacaaattt

SEQ ID NO: 5264 - DNA, 12 bp, Artificial Sequence
  Synthetic oligonucleotide
acccacaaattt

SEQ ID NO: 5265 - DNA, 12 bp, Artificial Sequence
  Synthetic oligonucleotide
acccacaaattt

SEQ ID NO: 5266 - DNA, 12 bp, Artificial Sequence
  Synthetic oligonucleotide
acccacaaattt

SEQ ID NO: 5267 - DNA, 12 bp, Artificial Sequence
  Synthetic oligonucleotide
acccacaaattt

SEQ ID NO: 5268 - DNA, 18 bp, Artificial Sequence
  Synthetic oligonucleotide
cagtgtctatgaccaaga

SEQ ID NO: 5269 - DNA, 15 bp, Artificial Sequence
  Synthetic oligonucleotide
ttctcagtggaagca

SEQ ID NO: 5270 - DNA, 16 bp, Artificial Sequence
  Synthetic oligonucleotide
ttctcagtggaagcaa

SEQ ID NO: 5271 - DNA, 17 bp, Artificial Sequence
  Synthetic oligonucleotide
atgcttcagttgtaaac

SEQ ID NO: 5272 - DNA, 17 bp, Artificial Sequence
  Synthetic oligonucleotide
tatggtttccaacccac

SEQ ID NO: 5273 - DNA, 18 bp, Artificial Sequence
  Synthetic oligonucleotide
cattagtgggttggaaac

SEQ ID NO: 5274 - DNA, 17 bp, Artificial Sequence
  Synthetic oligonucleotide
atgcttcagttgtaaac

SEQ ID NO: 5275 - DNA, 19 bp, Artificial Sequence
  Synthetic oligonucleotide
aatgcttcagttgtaaaca

SEQ ID NO: 5276 - DNA, 20 bp, Artificial Sequence
  Synthetic oligonucleotide
tgctgattattctgtcctat

SEQ ID NO: 5277 - DNA, 23 bp, Artificial Sequence
  Synthetic oligonucleotide
tgttgctgattattctgtcctat

SEQ ID NO: 5278 - DNA, 15 bp, Artificial Sequence
  Synthetic oligonucleotide
ttgctgctgtttaca

SEQ ID NO: 5279 - DNA, 18 bp, Artificial Sequence
  Synthetic oligonucleotide
atgctatacatgtctctg

SEQ ID NO: 5280 - DNA, 19 bp, Artificial Sequence
  Synthetic oligonucleotide
atgctatacatgtctctgg

SEQ ID NO: 5281 - DNA, 17 bp, Artificial Sequence
  Synthetic oligonucleotide
tggtcccagagacatgt

SEQ ID NO: 5282 - DNA, 15 bp, Artificial Sequence
  Synthetic oligonucleotide
tttccatccaacttt

SEQ ID NO: 5283 - DNA, 15 bp, Artificial Sequence
  Synthetic oligonucleotide
tttccatccaacttt

SEQ ID NO: 5284 - DNA, 16 bp, Artificial Sequence
  Synthetic oligonucleotide
caaaagttggatggaa

SEQ ID NO: 5285 - DNA, 17 bp, Artificial Sequence
  Synthetic oligonucleotide
actttccatccaacttt

SEQ ID NO: 5286 - DNA, 16 bp, Artificial Sequence
  Synthetic oligonucleotide
cttcaggttggacagc

SEQ ID NO: 5287 - DNA, 16 bp, Artificial Sequence
  Synthetic oligonucleotide
cttcaggttggacagc

SEQ ID NO: 5288 - DNA, 19 bp, Artificial Sequence
  Synthetic oligonucleotide
ttgtttttgtggtaataaa

SEQ ID NO: 5289 - DNA, 16 bp, Artificial Sequence
  Synthetic oligonucleotide
tttgtggtaataaaca

SEQ ID NO: 5290 - DNA, 18 bp, Artificial Sequence
  Synthetic oligonucleotide
aattacctgtatagattg

SEQ ID NO: 5291 - DNA, 18 bp, Artificial Sequence
  Synthetic oligonucleotide
aaggtttgagattagact

SEQ ID NO: 5292 - DNA, 19 bp, Artificial Sequence
  Synthetic oligonucleotide
aaaaggtttgagattagac

SEQ ID NO: 5293 - DNA, 20 bp, Artificial Sequence
  Synthetic oligonucleotide
tttttgtggtaataaacacc

SEQ ID NO: 5294 - DNA, 21 bp, Artificial Sequence
  Synthetic oligonucleotide
catttttgggtgtttattacc

SEQ ID NO: 5295 - DNA, 14 bp, Artificial Sequence
  Synthetic oligonucleotide
ccactgttggtttt

SEQ ID NO: 5296 - DNA, 21 bp, Artificial Sequence
  Synthetic oligonucleotide
ctaatgataacacttcaaggt

SEQ ID NO: 5297 - DNA, 21 bp, Artificial Sequence
  Synthetic oligonucleotide
ctaatgataacacttcaaggt

SEQ ID NO: 5298 - DNA, 21 bp, Artificial Sequence
  Synthetic oligonucleotide
ctaatgataacacttcaaggt

SEQ ID NO: 5299 - DNA, 16 bp, Artificial Sequence
  Synthetic oligonucleotide
aacgtcatgatactct

SEQ ID NO: 5300 - DNA, 16 bp, Artificial Sequence
  Synthetic oligonucleotide
aacgtcatgatactct

SEQ ID NO: 5301 - DNA, 16 bp, Artificial Sequence
  Synthetic oligonucleotide
aacgtcatgatactct

SEQ ID NO: 5302 - DNA, 15 bp, Artificial Sequence
  Synthetic oligonucleotide
ttcttgaaaatcttc

SEQ ID NO: 5303 - DNA, 15 bp, Artificial Sequence
  Synthetic oligonucleotide
ttcttgaaaatcttc

SEQ ID NO: 5304 - DNA, 15 bp, Artificial Sequence
  Synthetic oligonucleotide
ttcttgaaaatcttc

SEQ ID NO: 5305-6000 - skipped (696 entries)

SEQ ID NO: 6001 - DNA, 19 bp, Artificial Sequence
  Synthetic oligonucleotide
cctgccaattctactgtat

SEQ ID NO: 6002 - DNA, 15 bp, Artificial Sequence
  Synthetic oligonucleotide
caaaagggaaagcta

SEQ ID NO: 6003 - DNA, 12 bp, Artificial Sequence
  Synthetic oligonucleotide
caccgaaagatc

SEQ ID NO: 6004 - DNA, 12 bp, Artificial Sequence
  Synthetic oligonucleotide
caccgaaagatc

SEQ ID NO: 6005 - DNA, 12 bp, Artificial Sequence
  Synthetic oligonucleotide
caccgaaagatc

SEQ ID NO: 6006 - DNA, 17 bp, Artificial Sequence
  Synthetic oligonucleotide
tcaaacctaacactcta

SEQ ID NO: 6007 - DNA, 16 bp, Artificial Sequence
  Synthetic oligonucleotide
cagacattatagtttg

SEQ ID NO: 6008 - DNA, 14 bp, Artificial Sequence
  Synthetic oligonucleotide
aagcctcgacaaaa

SEQ ID NO: 6009 - DNA, 17 bp, Artificial Sequence
  Synthetic oligonucleotide
accttgtacttgtggta

SEQ ID NO: 6010 - DNA, 21 bp, Artificial Sequence
  Synthetic oligonucleotide
cagataccttgtacttgtggt

SEQ ID NO: 6011 - DNA, 17 bp, Artificial Sequence
  Synthetic oligonucleotide
accttgtacttgtggta

SEQ ID NO: 6012 - DNA, 14 bp, Artificial Sequence
  Synthetic oligonucleotide
tctcctggaatggc

SEQ ID NO: 6013 - DNA, 16 bp, Artificial Sequence
  Synthetic oligonucleotide
agaaggcttatgaaac

SEQ ID NO: 6014 - DNA, 16 bp, Artificial Sequence
  Synthetic oligonucleotide
tccatttagagacatt

SEQ ID NO: 6015 - DNA, 19 bp, Artificial Sequence
  Synthetic oligonucleotide
aaaatgtctctaaatggac

SEQ ID NO: 6016 - DNA, 13 bp, Artificial Sequence
  Synthetic oligonucleotide
ccccaccattctg

SEQ ID NO: 6017 - DNA, 14 bp, Artificial Sequence
  Synthetic oligonucleotide
cgccccaccattct

SEQ ID NO: 6018 - DNA, 11 bp, Artificial Sequence
  Synthetic oligonucleotide
ctggcaattgc

SEQ ID NO: 6019 - DNA, 13 bp, Artificial Sequence
  Synthetic oligonucleotide
tggctggcattgg

SEQ ID NO: 6020 - DNA, 14 bp, Artificial Sequence
  Synthetic oligonucleotide
ctgcctagagttga

SEQ ID NO: 6021 - DNA, 14 bp, Artificial Sequence
  Synthetic oligonucleotide
ctgcctagagttga

SEQ ID NO: 6022 - DNA, 16 bp, Artificial Sequence
  Synthetic oligonucleotide
ctgtctctgcagtaag

SEQ ID NO: 6023 - DNA, 14 bp, Artificial Sequence
  Synthetic oligonucleotide
ctcgagagaattta

SEQ ID NO: 6024 - DNA, 16 bp, Artificial Sequence
  Synthetic oligonucleotide
ctcaactcatgcctaa

SEQ ID NO: 6025 - DNA, 16 bp, Artificial Sequence
  Synthetic oligonucleotide
cttctcgtttctcatc

SEQ ID NO: 6026 - DNA, 16 bp, Artificial Sequence
  Synthetic oligonucleotide
tacgtgataaggaacg

SEQ ID NO: 6027 - DNA, 17 bp, Artificial Sequence
  Synthetic oligonucleotide
ttcaagaaatttaactc

SEQ ID NO: 6028 - DNA, 18 bp, Artificial Sequence
  Synthetic oligonucleotide
acaaaagttatcagcttc

SEQ ID NO: 6029 - DNA, 16 bp, Artificial Sequence
  Synthetic oligonucleotide
acatcttcgttgcatc

SEQ ID NO: 6030 - DNA, 13 bp, Artificial Sequence
  Synthetic oligonucleotide
caagccgtttcca

SEQ ID NO: 6031 - DNA, 14 bp, Artificial Sequence
  Synthetic oligonucleotide
agctacacaatatc

SEQ ID NO: 6032 - DNA, 16 bp, Artificial Sequence
  Synthetic oligonucleotide
aagctacacaatatct

SEQ ID NO: 6033 - DNA, 14 bp, Artificial Sequence
  Synthetic oligonucleotide
atggacacgttttt

SEQ ID NO: 6034 - DNA, 17 bp, Artificial Sequence
  Synthetic oligonucleotide
ctgccaattctactgta

SEQ ID NO: 6035 - DNA, 17 bp, Artificial Sequence
  Synthetic oligonucleotide
ctgccaattctactgta

SEQ ID NO: 6036 - DNA, 18 bp, Artificial Sequence
  Synthetic oligonucleotide
aagctgataacttttgtg

SEQ ID NO: 6037 - DNA, 18 bp, Artificial Sequence
  Synthetic oligonucleotide
aagctgataacttttgtg

SEQ ID NO: 6038 - DNA, 18 bp, Artificial Sequence
  Synthetic oligonucleotide
aagctgataacttttgtg

SEQ ID NO: 6039 - DNA, 18 bp, Artificial Sequence
  Synthetic oligonucleotide
aagctgataacttttgtg

SEQ ID NO: 6040 - DNA, 18 bp, Artificial Sequence
  Synthetic oligonucleotide
aagctgataacttttgtg

SEQ ID NO: 6041 - DNA, 18 bp, Artificial Sequence
  Synthetic oligonucleotide
aagctgataacttttgtg

SEQ ID NO: 6042 - DNA, 18 bp, Artificial Sequence
  Synthetic oligonucleotide
aagctgataacttttgtg

SEQ ID NO: 6043 - DNA, 18 bp, Artificial Sequence
  Synthetic oligonucleotide
aagctgataacttttgtg

SEQ ID NO: 6044 - DNA, 18 bp, Artificial Sequence
  Synthetic oligonucleotide
aagctgataacttttgtg

SEQ ID NO: 6045 - DNA, 18 bp, Artificial Sequence
  Synthetic oligonucleotide
aagctgataacttttgtg

SEQ ID NO: 6046 - DNA, 18 bp, Artificial Sequence
  Synthetic oligonucleotide
aagctgataacttttgtg

SEQ ID NO: 6047 - DNA, 18 bp, Artificial Sequence
  Synthetic oligonucleotide
aagctgataacttttgtg

SEQ ID NO: 6048 - DNA, 18 bp, Artificial Sequence
  Synthetic oligonucleotide
aagctgataacttttgtg

SEQ ID NO: 6049 - DNA, 18 bp, Artificial Sequence
  Synthetic oligonucleotide
aagctgataacttttgtg

SEQ ID NO: 6050 - DNA, 18 bp, Artificial Sequence
  Synthetic oligonucleotide
aagctgataacttttgtg

SEQ ID NO: 6051 - DNA, 18 bp, Artificial Sequence
  Synthetic oligonucleotide
aagctgataacttttgtg

SEQ ID NO: 6052 - DNA, 18 bp, Artificial Sequence
  Synthetic oligonucleotide
aagctgataacttttgtg

SEQ ID NO: 6053 - DNA, 18 bp, Artificial Sequence
  Synthetic oligonucleotide
aagctgataacttttgtg

SEQ ID NO: 6054 - DNA, 18 bp, Artificial Sequence
  Synthetic oligonucleotide
aagctgataacttttgtg

SEQ ID NO: 6055 - DNA, 18 bp, Artificial Sequence
  Synthetic oligonucleotide
aagctgataacttttgtg

SEQ ID NO: 6056 - DNA, 18 bp, Artificial Sequence
  Synthetic oligonucleotide
aagctgataacttttgtg

SEQ ID NO: 6057 - DNA, 18 bp, Artificial Sequence
  Synthetic oligonucleotide
aagctgataacttttgtg

SEQ ID NO: 6058 - DNA, 18 bp, Artificial Sequence
  Synthetic oligonucleotide
aagctgataacttttgtg

SEQ ID NO: 6059 - DNA, 18 bp, Artificial Sequence
  Synthetic oligonucleotide
aagctgataacttttgtg

SEQ ID NO: 6060 - DNA, 16 bp, Artificial Sequence
  Synthetic oligonucleotide
acatcttcgttgcatc

SEQ ID NO: 6061 - DNA, 16 bp, Artificial Sequence
  Synthetic oligonucleotide
cacaacattactttga

SEQ ID NO: 6062 - DNA, 19 bp, Artificial Sequence
  Synthetic oligonucleotide
agtcacaacattactttga

SEQ ID NO: 6063 - DNA, 13 bp, Artificial Sequence
  Synthetic oligonucleotide
caagccgtttcca

SEQ ID NO: 6064 - DNA, 13 bp, Artificial Sequence
  Synthetic oligonucleotide
caagccgtttcca

SEQ ID NO: 6065 - DNA, 15 bp, Artificial Sequence
  Synthetic oligonucleotide
tggcacttctctcaa

SEQ ID NO: 6066 - DNA, 16 bp, Artificial Sequence
  Synthetic oligonucleotide
tttacactgtttaagc

SEQ ID NO: 6067 - DNA, 14 bp, Artificial Sequence
  Synthetic oligonucleotide
aaagcctgtttatg

SEQ ID NO: 6068 - DNA, 15 bp, Artificial Sequence
  Synthetic oligonucleotide
caagctacaacatta

SEQ ID NO: 6069 - DNA, 19 bp, Artificial Sequence
  Synthetic oligonucleotide
ttgaaaaccattgttcgta

SEQ ID NO: 6070 - DNA, 15 bp, Artificial Sequence
  Synthetic oligonucleotide
catctgacgttttag

SEQ ID NO: 6071 - DNA, 16 bp, Artificial Sequence
  Synthetic oligonucleotide
tccggtgtgactgtta

SEQ ID NO: 6072 - DNA, 14 bp, Artificial Sequence
  Synthetic oligonucleotide
cggtgtgactgtta

SEQ ID NO: 6073 - DNA, 16 bp, Artificial Sequence
  Synthetic oligonucleotide
tgttgcaaactatcaa

SEQ ID NO: 6074 - DNA, 14 bp, Artificial Sequence
  Synthetic oligonucleotide
cgtgttatacgatc

SEQ ID NO: 6075 - DNA, 19 bp, Artificial Sequence
  Synthetic oligonucleotide
aagagtcatttttctattg

SEQ ID NO: 6076 - DNA, 19 bp, Artificial Sequence
  Synthetic oligonucleotide
ataatgttacttactttaa

SEQ ID NO: 6077 - DNA, 15 bp, Artificial Sequence
  Synthetic oligonucleotide
tgtactggaagactc

SEQ ID NO: 6078 - DNA, 15 bp, Artificial Sequence
  Synthetic oligonucleotide
ctcttgtagcactag

SEQ ID NO: 6079 - DNA, 13 bp, Artificial Sequence
  Synthetic oligonucleotide
agcagaacaacgc

SEQ ID NO: 6080 - DNA, 15 bp, Artificial Sequence
  Synthetic oligonucleotide
acaaccatgcaagtt

SEQ ID NO: 6081 - DNA, 16 bp, Artificial Sequence
  Synthetic oligonucleotide
aacatacgaattaaca

SEQ ID NO: 6082 - DNA, 14 bp, Artificial Sequence
  Synthetic oligonucleotide
atggacacgttttt

SEQ ID NO: 6083 - DNA, 14 bp, Artificial Sequence
  Synthetic oligonucleotide
atggacacgttttt

SEQ ID NO: 6084 - DNA, 13 bp, Artificial Sequence
  Synthetic oligonucleotide
cccggtagccacg

SEQ ID NO: 6085 - DNA, 14 bp, Artificial Sequence
  Synthetic oligonucleotide
tgagctgctttgtc

SEQ ID NO: 6086 - DNA, 15 bp, Artificial Sequence
  Synthetic oligonucleotide
attgcggatatactt

SEQ ID NO: 6087 - DNA, 18 bp, Artificial Sequence
  Synthetic oligonucleotide
aacaaaatctaaaggagt

SEQ ID NO: 6088 - DNA, 19 bp, Artificial Sequence
  Synthetic oligonucleotide
cgaacaaaatctaaaggag

SEQ ID NO: 6089 - DNA, 16 bp, Artificial Sequence
  Synthetic oligonucleotide
acaacagatgtctcat

SEQ ID NO: 6090 - DNA, 16 bp, Artificial Sequence
  Synthetic oligonucleotide
acaacagatgtctcat

SEQ ID NO: 6091 - DNA, 17 bp, Artificial Sequence
  Synthetic oligonucleotide
tcaacgagatgagacat

SEQ ID NO: 6092 - DNA, 17 bp, Artificial Sequence
  Synthetic oligonucleotide
caatcattctatctttc

SEQ ID NO: 6093 - DNA, 18 bp, Artificial Sequence
  Synthetic oligonucleotide
catgtacttaacatcaac

SEQ ID NO: 6094 - DNA, 17 bp, Artificial Sequence
  Synthetic oligonucleotide
atgtacttaacatcaac

SEQ ID NO: 6095 - DNA, 14 bp, Artificial Sequence
  Synthetic oligonucleotide
tgtacttaacatca

SEQ ID NO: 6096 - DNA, 17 bp, Artificial Sequence
  Synthetic oligonucleotide
tggttgatgttaagtac

SEQ ID NO: 6097 - DNA, 16 bp, Artificial Sequence
  Synthetic oligonucleotide
ttgatgttaagtacat

SEQ ID NO: 6098 - DNA, 17 bp, Artificial Sequence
  Synthetic oligonucleotide
atgtacttaacatcaac

SEQ ID NO: 6099 - DNA, 14 bp, Artificial Sequence
  Synthetic oligonucleotide
tgtacttaacatca

SEQ ID NO: 6100 - DNA, 17 bp, Artificial Sequence
  Synthetic oligonucleotide
tggttgatgttaagtac

SEQ ID NO: 6101 - DNA, 16 bp, Artificial Sequence
  Synthetic oligonucleotide
ttgatgttaagtacat

SEQ ID NO: 6102 - DNA, 14 bp, Artificial Sequence
  Synthetic oligonucleotide
aggtttgctaaccc

SEQ ID NO: 6103 - DNA, 18 bp, Artificial Sequence
  Synthetic oligonucleotide
tgtacttaacatcaacca

SEQ ID NO: 6104 - DNA, 18 bp, Artificial Sequence
  Synthetic oligonucleotide
tgtacttaacatcaacca

SEQ ID NO: 6105 - DNA, 18 bp, Artificial Sequence
  Synthetic oligonucleotide
tgtacttaacatcaacca

SEQ ID NO: 6106 - DNA, 18 bp, Artificial Sequence
  Synthetic oligonucleotide
tgtacttaacatcaacca

SEQ ID NO: 6107 - DNA, 18 bp, Artificial Sequence
  Synthetic oligonucleotide
tgtacttaacatcaacca

SEQ ID NO: 6108 - DNA, 18 bp, Artificial Sequence
  Synthetic oligonucleotide
tgtacttaacatcaacca

SEQ ID NO: 6109 - DNA, 18 bp, Artificial Sequence
  Synthetic oligonucleotide
tgtacttaacatcaacca

SEQ ID NO: 6110 - DNA, 18 bp, Artificial Sequence
  Synthetic oligonucleotide
tgtacttaacatcaacca

SEQ ID NO: 6111 - DNA, 18 bp, Artificial Sequence
  Synthetic oligonucleotide
tgtacttaacatcaacca

SEQ ID NO: 6112 - DNA, 18 bp, Artificial Sequence
  Synthetic oligonucleotide
tgtacttaacatcaacca

SEQ ID NO: 6113 - DNA, 18 bp, Artificial Sequence
  Synthetic oligonucleotide
tgtacttaacatcaacca

SEQ ID NO: 6114 - DNA, 18 bp, Artificial Sequence
  Synthetic oligonucleotide
tgtacttaacatcaacca

SEQ ID NO: 6115 - DNA, 18 bp, Artificial Sequence
  Synthetic oligonucleotide
tgtacttaacatcaacca

SEQ ID NO: 6116 - DNA, 18 bp, Artificial Sequence
  Synthetic oligonucleotide
tgtacttaacatcaacca

SEQ ID NO: 6117 - DNA, 18 bp, Artificial Sequence
  Synthetic oligonucleotide
tgtacttaacatcaacca

SEQ ID NO: 6118 - DNA, 18 bp, Artificial Sequence
  Synthetic oligonucleotide
tgtacttaacatcaacca

SEQ ID NO: 6119 - DNA, 18 bp, Artificial Sequence
  Synthetic oligonucleotide
tgtacttaacatcaacca

SEQ ID NO: 6120 - DNA, 18 bp, Artificial Sequence
  Synthetic oligonucleotide
tgtacttaacatcaacca

SEQ ID NO: 6121 - DNA, 18 bp, Artificial Sequence
  Synthetic oligonucleotide
tgtacttaacatcaacca

SEQ ID NO: 6122 - DNA, 18 bp, Artificial Sequence
  Synthetic oligonucleotide
tgtacttaacatcaacca

SEQ ID NO: 6123 - DNA, 18 bp, Artificial Sequence
  Synthetic oligonucleotide
tgtacttaacatcaacca

SEQ ID NO: 6124 - DNA, 18 bp, Artificial Sequence
  Synthetic oligonucleotide
tgtacttaacatcaacca

SEQ ID NO: 6125 - DNA, 18 bp, Artificial Sequence
  Synthetic oligonucleotide
tgtacttaacatcaacca

SEQ ID NO: 6126 - DNA, 18 bp, Artificial Sequence
  Synthetic oligonucleotide
tgtacttaacatcaacca

SEQ ID NO: 6127 - DNA, 18 bp, Artificial Sequence
  Synthetic oligonucleotide
tgtacttaacatcaacca

SEQ ID NO: 6128 - DNA, 18 bp, Artificial Sequence
  Synthetic oligonucleotide
tgtacttaacatcaacca

SEQ ID NO: 6129 - DNA, 18 bp, Artificial Sequence
  Synthetic oligonucleotide
tgtacttaacatcaacca

SEQ ID NO: 6130 - DNA, 18 bp, Artificial Sequence
  Synthetic oligonucleotide
tgtacttaacatcaacca

SEQ ID NO: 6131 - DNA, 18 bp, Artificial Sequence
  Synthetic oligonucleotide
tgtacttaacatcaacca

SEQ ID NO: 6132 - DNA, 18 bp, Artificial Sequence
  Synthetic oligonucleotide
tgtacttaacatcaacca

SEQ ID NO: 6133 - DNA, 18 bp, Artificial Sequence
  Synthetic oligonucleotide
tgtacttaacatcaacca

SEQ ID NO: 6134 - DNA, 18 bp, Artificial Sequence
  Synthetic oligonucleotide
tgtacttaacatcaacca

SEQ ID NO: 6135 - DNA, 18 bp, Artificial Sequence
  Synthetic oligonucleotide
tgtacttaacatcaacca

SEQ ID NO: 6136 - DNA, 18 bp, Artificial Sequence
  Synthetic oligonucleotide
tgtacttaacatcaacca

SEQ ID NO: 6137 - DNA, 18 bp, Artificial Sequence
  Synthetic oligonucleotide
tgtacttaacatcaacca

SEQ ID NO: 6138 - DNA, 18 bp, Artificial Sequence
  Synthetic oligonucleotide
tgtacttaacatcaacca

SEQ ID NO: 6139 - DNA, 18 bp, Artificial Sequence
  Synthetic oligonucleotide
tgtacttaacatcaacca

SEQ ID NO: 6140 - DNA, 18 bp, Artificial Sequence
  Synthetic oligonucleotide
tgtacttaacatcaacca

SEQ ID NO: 6141 - DNA, 18 bp, Artificial Sequence
  Synthetic oligonucleotide
tgtacttaacatcaacca

SEQ ID NO: 6142 - DNA, 18 bp, Artificial Sequence
  Synthetic oligonucleotide
tgtacttaacatcaacca

SEQ ID NO: 6143 - DNA, 18 bp, Artificial Sequence
  Synthetic oligonucleotide
tgtacttaacatcaacca

SEQ ID NO: 6144 - DNA, 18 bp, Artificial Sequence
  Synthetic oligonucleotide
tgtacttaacatcaacca

SEQ ID NO: 6145 - DNA, 18 bp, Artificial Sequence
  Synthetic oligonucleotide
tgtacttaacatcaacca

SEQ ID NO: 6146 - DNA, 18 bp, Artificial Sequence
  Synthetic oligonucleotide
tgtacttaacatcaacca

SEQ ID NO: 6147 - DNA, 18 bp, Artificial Sequence
  Synthetic oligonucleotide
tgtacttaacatcaacca

SEQ ID NO: 6148 - DNA, 18 bp, Artificial Sequence
  Synthetic oligonucleotide
tgtacttaacatcaacca

SEQ ID NO: 6149 - DNA, 18 bp, Artificial Sequence
  Synthetic oligonucleotide
tgtacttaacatcaacca

SEQ ID NO: 6150 - DNA, 18 bp, Artificial Sequence
  Synthetic oligonucleotide
tgtacttaacatcaacca

SEQ ID NO: 6151 - DNA, 18 bp, Artificial Sequence
  Synthetic oligonucleotide
tgtacttaacatcaacca

SEQ ID NO: 6152 - DNA, 18 bp, Artificial Sequence
  Synthetic oligonucleotide
tgtacttaacatcaacca

SEQ ID NO: 6153 - DNA, 18 bp, Artificial Sequence
  Synthetic oligonucleotide
tgtacttaacatcaacca

SEQ ID NO: 6154 - DNA, 18 bp, Artificial Sequence
  Synthetic oligonucleotide
tgtacttaacatcaacca

SEQ ID NO: 6155 - DNA, 18 bp, Artificial Sequence
  Synthetic oligonucleotide
tgtacttaacatcaacca

SEQ ID NO: 6156 - DNA, 18 bp, Artificial Sequence
  Synthetic oligonucleotide
tgtacttaacatcaacca

SEQ ID NO: 6157 - DNA, 18 bp, Artificial Sequence
  Synthetic oligonucleotide
tgtacttaacatcaacca

SEQ ID NO: 6158 - DNA, 18 bp, Artificial Sequence
  Synthetic oligonucleotide
tgtacttaacatcaacca

SEQ ID NO: 6159 - DNA, 18 bp, Artificial Sequence
  Synthetic oligonucleotide
tgtacttaacatcaacca

SEQ ID NO: 6160 - DNA, 18 bp, Artificial Sequence
  Synthetic oligonucleotide
tgtacttaacatcaacca

SEQ ID NO: 6161 - DNA, 18 bp, Artificial Sequence
  Synthetic oligonucleotide
tgtacttaacatcaacca

SEQ ID NO: 6162 - DNA, 18 bp, Artificial Sequence
  Synthetic oligonucleotide
tgtacttaacatcaacca

SEQ ID NO: 6163 - DNA, 18 bp, Artificial Sequence
  Synthetic oligonucleotide
tgtacttaacatcaacca

SEQ ID NO: 6164 - DNA, 18 bp, Artificial Sequence
  Synthetic oligonucleotide
tgtacttaacatcaacca

SEQ ID NO: 6165 - DNA, 18 bp, Artificial Sequence
  Synthetic oligonucleotide
tgtacttaacatcaacca

SEQ ID NO: 6166 - DNA, 18 bp, Artificial Sequence
  Synthetic oligonucleotide
tgtacttaacatcaacca

SEQ ID NO: 6167 - DNA, 18 bp, Artificial Sequence
  Synthetic oligonucleotide
tgtacttaacatcaacca

SEQ ID NO: 6168 - DNA, 18 bp, Artificial Sequence
  Synthetic oligonucleotide
tgtacttaacatcaacca

SEQ ID NO: 6169 - DNA, 18 bp, Artificial Sequence
  Synthetic oligonucleotide
tgtacttaacatcaacca

SEQ ID NO: 6170 - DNA, 18 bp, Artificial Sequence
  Synthetic oligonucleotide
tgtacttaacatcaacca

SEQ ID NO: 6171 - DNA, 18 bp, Artificial Sequence
  Synthetic oligonucleotide
tgtacttaacatcaacca

SEQ ID NO: 6172 - DNA, 18 bp, Artificial Sequence
  Synthetic oligonucleotide
tgtacttaacatcaacca

SEQ ID NO: 6173 - DNA, 18 bp, Artificial Sequence
  Synthetic oligonucleotide
tgtacttaacatcaacca

SEQ ID NO: 6174 - DNA, 18 bp, Artificial Sequence
  Synthetic oligonucleotide
tgtacttaacatcaacca

SEQ ID NO: 6175 - DNA, 18 bp, Artificial Sequence
  Synthetic oligonucleotide
tgtacttaacatcaacca

SEQ ID NO: 6176 - DNA, 18 bp, Artificial Sequence
  Synthetic oligonucleotide
tgtacttaacatcaacca

SEQ ID NO: 6177 - DNA, 18 bp, Artificial Sequence
  Synthetic oligonucleotide
tgtacttaacatcaacca

SEQ ID NO: 6178 - DNA, 18 bp, Artificial Sequence
  Synthetic oligonucleotide
tgtacttaacatcaacca

SEQ ID NO: 6179 - DNA, 18 bp, Artificial Sequence
  Synthetic oligonucleotide
tgtacttaacatcaacca

SEQ ID NO: 6180 - DNA, 18 bp, Artificial Sequence
  Synthetic oligonucleotide
tgtacttaacatcaacca

SEQ ID NO: 6181 - DNA, 18 bp, Artificial Sequence
  Synthetic oligonucleotide
tgtacttaacatcaacca

SEQ ID NO: 6182 - DNA, 18 bp, Artificial Sequence
  Synthetic oligonucleotide
tgtacttaacatcaacca

SEQ ID NO: 6183 - DNA, 18 bp, Artificial Sequence
  Synthetic oligonucleotide
tgtacttaacatcaacca

SEQ ID NO: 6184 - DNA, 18 bp, Artificial Sequence
  Synthetic oligonucleotide
tgtacttaacatcaacca

SEQ ID NO: 6185 - DNA, 18 bp, Artificial Sequence
  Synthetic oligonucleotide
tgtacttaacatcaacca

SEQ ID NO: 6186 - DNA, 18 bp, Artificial Sequence
  Synthetic oligonucleotide
tgtacttaacatcaacca

SEQ ID NO: 6187 - DNA, 18 bp, Artificial Sequence
  Synthetic oligonucleotide
tgtacttaacatcaacca

SEQ ID NO: 6188 - DNA, 18 bp, Artificial Sequence
  Synthetic oligonucleotide
tgtacttaacatcaacca

SEQ ID NO: 6189 - DNA, 18 bp, Artificial Sequence
  Synthetic oligonucleotide
tgtacttaacatcaacca

SEQ ID NO: 6190 - DNA, 18 bp, Artificial Sequence
  Synthetic oligonucleotide
tgtacttaacatcaacca

SEQ ID NO: 6191 - DNA, 18 bp, Artificial Sequence
  Synthetic oligonucleotide
tgtacttaacatcaacca

SEQ ID NO: 6192 - DNA, 18 bp, Artificial Sequence
  Synthetic oligonucleotide
tgtacttaacatcaacca

SEQ ID NO: 6193 - DNA, 18 bp, Artificial Sequence
  Synthetic oligonucleotide
tgtacttaacatcaacca

SEQ ID NO: 6194 - DNA, 18 bp, Artificial Sequence
  Synthetic oligonucleotide
tgtacttaacatcaacca

SEQ ID NO: 6195 - DNA, 18 bp, Artificial Sequence
  Synthetic oligonucleotide
tgtacttaacatcaacca

SEQ ID NO: 6196 - DNA, 18 bp, Artificial Sequence
  Synthetic oligonucleotide
tgtacttaacatcaacca

SEQ ID NO: 6197 - DNA, 18 bp, Artificial Sequence
  Synthetic oligonucleotide
tgtacttaacatcaacca

SEQ ID NO: 6198 - DNA, 18 bp, Artificial Sequence
  Synthetic oligonucleotide
tgtacttaacatcaacca

SEQ ID NO: 6199 - DNA, 18 bp, Artificial Sequence
  Synthetic oligonucleotide
tgtacttaacatcaacca

SEQ ID NO: 6200 - DNA, 18 bp, Artificial Sequence
  Synthetic oligonucleotide
tgtacttaacatcaacca

SEQ ID NO: 6201 - DNA, 18 bp, Artificial Sequence
  Synthetic oligonucleotide
tgtacttaacatcaacca

SEQ ID NO: 6202 - DNA, 18 bp, Artificial Sequence
  Synthetic oligonucleotide
tgtacttaacatcaacca

SEQ ID NO: 6203 - DNA, 18 bp, Artificial Sequence
  Synthetic oligonucleotide
tgtacttaacatcaacca

SEQ ID NO: 6204 - DNA, 18 bp, Artificial Sequence
  Synthetic oligonucleotide
tgtacttaacatcaacca

SEQ ID NO: 6205 - DNA, 18 bp, Artificial Sequence
  Synthetic oligonucleotide
tgtacttaacatcaacca

SEQ ID NO: 6206 - DNA, 18 bp, Artificial Sequence
  Synthetic oligonucleotide
tgtacttaacatcaacca

SEQ ID NO: 6207 - DNA, 18 bp, Artificial Sequence
  Synthetic oligonucleotide
tgtacttaacatcaacca

SEQ ID NO: 6208 - DNA, 18 bp, Artificial Sequence
  Synthetic oligonucleotide
tgtacttaacatcaacca

SEQ ID NO: 6209 - DNA, 18 bp, Artificial Sequence
  Synthetic oligonucleotide
tgtacttaacatcaacca

SEQ ID NO: 6210 - DNA, 18 bp, Artificial Sequence
  Synthetic oligonucleotide
tgtacttaacatcaacca

SEQ ID NO: 6211 - DNA, 18 bp, Artificial Sequence
  Synthetic oligonucleotide
tgtacttaacatcaacca

SEQ ID NO: 6212 - DNA, 18 bp, Artificial Sequence
  Synthetic oligonucleotide
tgtacttaacatcaacca

SEQ ID NO: 6213 - DNA, 18 bp, Artificial Sequence
  Synthetic oligonucleotide
tgtacttaacatcaacca

SEQ ID NO: 6214 - DNA, 18 bp, Artificial Sequence
  Synthetic oligonucleotide
tgtacttaacatcaacca

SEQ ID NO: 6215 - DNA, 18 bp, Artificial Sequence
  Synthetic oligonucleotide
tgtacttaacatcaacca

SEQ ID NO: 6216 - DNA, 18 bp, Artificial Sequence
  Synthetic oligonucleotide
tgtacttaacatcaacca

SEQ ID NO: 6217 - DNA, 18 bp, Artificial Sequence
  Synthetic oligonucleotide
tgtacttaacatcaacca

SEQ ID NO: 6218 - DNA, 18 bp, Artificial Sequence
  Synthetic oligonucleotide
tgtacttaacatcaacca

SEQ ID NO: 6219 - DNA, 18 bp, Artificial Sequence
  Synthetic oligonucleotide
tgtacttaacatcaacca

SEQ ID NO: 6220 - DNA, 18 bp, Artificial Sequence
  Synthetic oligonucleotide
tgtacttaacatcaacca

SEQ ID NO: 6221 - DNA, 18 bp, Artificial Sequence
  Synthetic oligonucleotide
tgtacttaacatcaacca

SEQ ID NO: 6222 - DNA, 18 bp, Artificial Sequence
  Synthetic oligonucleotide
tgtacttaacatcaacca

SEQ ID NO: 6223 - DNA, 18 bp, Artificial Sequence
  Synthetic oligonucleotide
tgtacttaacatcaacca

SEQ ID NO: 6224 - DNA, 18 bp, Artificial Sequence
  Synthetic oligonucleotide
tgtacttaacatcaacca

SEQ ID NO: 6225 - DNA, 18 bp, Artificial Sequence
  Synthetic oligonucleotide
tgtacttaacatcaacca

SEQ ID NO: 6226 - DNA, 18 bp, Artificial Sequence
  Synthetic oligonucleotide
tgtacttaacatcaacca

SEQ ID NO: 6227 - DNA, 18 bp, Artificial Sequence
  Synthetic oligonucleotide
tgtacttaacatcaacca

SEQ ID NO: 6228 - DNA, 18 bp, Artificial Sequence
  Synthetic oligonucleotide
tgtacttaacatcaacca

SEQ ID NO: 6229 - DNA, 18 bp, Artificial Sequence
  Synthetic oligonucleotide
tgtacttaacatcaacca

SEQ ID NO: 6230 - DNA, 18 bp, Artificial Sequence
  Synthetic oligonucleotide
tgtacttaacatcaacca

SEQ ID NO: 6231 - DNA, 18 bp, Artificial Sequence
  Synthetic oligonucleotide
tgtacttaacatcaacca

SEQ ID NO: 6232 - DNA, 18 bp, Artificial Sequence
  Synthetic oligonucleotide
tgtacttaacatcaacca

SEQ ID NO: 6233 - DNA, 18 bp, Artificial Sequence
  Synthetic oligonucleotide
tgtacttaacatcaacca

SEQ ID NO: 6234 - DNA, 18 bp, Artificial Sequence
  Synthetic oligonucleotide
tgtacttaacatcaacca

SEQ ID NO: 6235 - DNA, 18 bp, Artificial Sequence
  Synthetic oligonucleotide
tgtacttaacatcaacca

SEQ ID NO: 6236 - DNA, 18 bp, Artificial Sequence
  Synthetic oligonucleotide
tgtacttaacatcaacca

SEQ ID NO: 6237 - DNA, 18 bp, Artificial Sequence
  Synthetic oligonucleotide
tgtacttaacatcaacca

SEQ ID NO: 6238 - DNA, 18 bp, Artificial Sequence
  Synthetic oligonucleotide
tgtacttaacatcaacca

SEQ ID NO: 6239 - DNA, 18 bp, Artificial Sequence
  Synthetic oligonucleotide
tgtacttaacatcaacca

SEQ ID NO: 6240 - DNA, 18 bp, Artificial Sequence
  Synthetic oligonucleotide
tgtacttaacatcaacca

SEQ ID NO: 6241 - DNA, 18 bp, Artificial Sequence
  Synthetic oligonucleotide
tgtacttaacatcaacca

SEQ ID NO: 6242 - DNA, 18 bp, Artificial Sequence
  Synthetic oligonucleotide
tgtacttaacatcaacca

SEQ ID NO: 6243 - DNA, 18 bp, Artificial Sequence
  Synthetic oligonucleotide
tgtacttaacatcaacca

SEQ ID NO: 6244 - DNA, 18 bp, Artificial Sequence
  Synthetic oligonucleotide
tgtacttaacatcaacca

SEQ ID NO: 6245 - DNA, 18 bp, Artificial Sequence
  Synthetic oligonucleotide
tgtacttaacatcaacca

SEQ ID NO: 6246 - DNA, 18 bp, Artificial Sequence
  Synthetic oligonucleotide
tgtacttaacatcaacca

SEQ ID NO: 6247 - DNA, 18 bp, Artificial Sequence
  Synthetic oligonucleotide
tgtacttaacatcaacca

SEQ ID NO: 6248 - DNA, 18 bp, Artificial Sequence
  Synthetic oligonucleotide
tgtacttaacatcaacca

SEQ ID NO: 6249 - DNA, 18 bp, Artificial Sequence
  Synthetic oligonucleotide
tgtacttaacatcaacca

SEQ ID NO: 6250 - DNA, 18 bp, Artificial Sequence
  Synthetic oligonucleotide
tgtacttaacatcaacca

SEQ ID NO: 6251 - DNA, 18 bp, Artificial Sequence
  Synthetic oligonucleotide
tgtacttaacatcaacca

SEQ ID NO: 6252 - DNA, 18 bp, Artificial Sequence
  Synthetic oligonucleotide
tgtacttaacatcaacca

SEQ ID NO: 6253 - DNA, 18 bp, Artificial Sequence
  Synthetic oligonucleotide
tgtacttaacatcaacca

SEQ ID NO: 6254 - DNA, 18 bp, Artificial Sequence
  Synthetic oligonucleotide
tgtacttaacatcaacca

SEQ ID NO: 6255 - DNA, 18 bp, Artificial Sequence
  Synthetic oligonucleotide
tgtacttaacatcaacca

SEQ ID NO: 6256 - DNA, 18 bp, Artificial Sequence
  Synthetic oligonucleotide
tgtacttaacatcaacca

SEQ ID NO: 6257 - DNA, 18 bp, Artificial Sequence
  Synthetic oligonucleotide
tgtacttaacatcaacca

SEQ ID NO: 6258 - DNA, 18 bp, Artificial Sequence
  Synthetic oligonucleotide
tgtacttaacatcaacca

SEQ ID NO: 6259 - DNA, 18 bp, Artificial Sequence
  Synthetic oligonucleotide
tgtacttaacatcaacca

SEQ ID NO: 6260 - DNA, 18 bp, Artificial Sequence
  Synthetic oligonucleotide
tgtacttaacatcaacca

SEQ ID NO: 6261 - DNA, 18 bp, Artificial Sequence
  Synthetic oligonucleotide
tgtacttaacatcaacca

SEQ ID NO: 6262 - DNA, 18 bp, Artificial Sequence
  Synthetic oligonucleotide
tgtacttaacatcaacca

SEQ ID NO: 6263 - DNA, 18 bp, Artificial Sequence
  Synthetic oligonucleotide
tgtacttaacatcaacca

SEQ ID NO: 6264 - DNA, 18 bp, Artificial Sequence
  Synthetic oligonucleotide
tgtacttaacatcaacca

SEQ ID NO: 6265 - DNA, 18 bp, Artificial Sequence
  Synthetic oligonucleotide
tgtacttaacatcaacca

SEQ ID NO: 6266 - DNA, 18 bp, Artificial Sequence
  Synthetic oligonucleotide
tgtacttaacatcaacca

SEQ ID NO: 6267 - DNA, 18 bp, Artificial Sequence
  Synthetic oligonucleotide
tgtacttaacatcaacca

SEQ ID NO: 6268 - DNA, 18 bp, Artificial Sequence
  Synthetic oligonucleotide
tgtacttaacatcaacca

SEQ ID NO: 6269 - DNA, 18 bp, Artificial Sequence
  Synthetic oligonucleotide
tgtacttaacatcaacca

SEQ ID NO: 6270 - DNA, 18 bp, Artificial Sequence
  Synthetic oligonucleotide
tgtacttaacatcaacca

SEQ ID NO: 6271 - DNA, 18 bp, Artificial Sequence
  Synthetic oligonucleotide
tgtacttaacatcaacca

SEQ ID NO: 6272 - DNA, 18 bp, Artificial Sequence
  Synthetic oligonucleotide
tgtacttaacatcaacca

SEQ ID NO: 6273 - DNA, 18 bp, Artificial Sequence
  Synthetic oligonucleotide
tgtacttaacatcaacca

SEQ ID NO: 6274 - DNA, 18 bp, Artificial Sequence
  Synthetic oligonucleotide
tgtacttaacatcaacca

SEQ ID NO: 6275 - DNA, 18 bp, Artificial Sequence
  Synthetic oligonucleotide
tgtacttaacatcaacca

SEQ ID NO: 6276 - DNA, 18 bp, Artificial Sequence
  Synthetic oligonucleotide
tgtacttaacatcaacca

SEQ ID NO: 6277 - DNA, 18 bp, Artificial Sequence
  Synthetic oligonucleotide
tgtacttaacatcaacca

SEQ ID NO: 6278 - DNA, 18 bp, Artificial Sequence
  Synthetic oligonucleotide
tgtacttaacatcaacca

SEQ ID NO: 6279 - DNA, 18 bp, Artificial Sequence
  Synthetic oligonucleotide
tgtacttaacatcaacca

SEQ ID NO: 6280 - DNA, 18 bp, Artificial Sequence
  Synthetic oligonucleotide
tgtacttaacatcaacca

SEQ ID NO: 6281 - DNA, 18 bp, Artificial Sequence
  Synthetic oligonucleotide
tgtacttaacatcaacca

SEQ ID NO: 6282 - DNA, 18 bp, Artificial Sequence
  Synthetic oligonucleotide
tgtacttaacatcaacca

SEQ ID NO: 6283 - DNA, 18 bp, Artificial Sequence
  Synthetic oligonucleotide
tgtacttaacatcaacca

SEQ ID NO: 6284 - DNA, 18 bp, Artificial Sequence
  Synthetic oligonucleotide
tgtacttaacatcaacca

SEQ ID NO: 6285 - DNA, 18 bp, Artificial Sequence
  Synthetic oligonucleotide
tgtacttaacatcaacca

SEQ ID NO: 6286 - DNA, 18 bp, Artificial Sequence
  Synthetic oligonucleotide
tgtacttaacatcaacca

SEQ ID NO: 6287 - DNA, 18 bp, Artificial Sequence
  Synthetic oligonucleotide
tgtacttaacatcaacca

SEQ ID NO: 6288 - DNA, 18 bp, Artificial Sequence
  Synthetic oligonucleotide
tgtacttaacatcaacca

SEQ ID NO: 6289 - DNA, 18 bp, Artificial Sequence
  Synthetic oligonucleotide
tgtacttaacatcaacca

SEQ ID NO: 6290 - DNA, 18 bp, Artificial Sequence
  Synthetic oligonucleotide
tgtacttaacatcaacca

SEQ ID NO: 6291 - DNA, 18 bp, Artificial Sequence
  Synthetic oligonucleotide
tgtacttaacatcaacca

SEQ ID NO: 6292 - DNA, 18 bp, Artificial Sequence
  Synthetic oligonucleotide
tgtacttaacatcaacca

SEQ ID NO: 6293 - DNA, 18 bp, Artificial Sequence
  Synthetic oligonucleotide
tgtacttaacatcaacca

SEQ ID NO: 6294 - DNA, 18 bp, Artificial Sequence
  Synthetic oligonucleotide
tgtacttaacatcaacca

SEQ ID NO: 6295 - DNA, 18 bp, Artificial Sequence
  Synthetic oligonucleotide
tgtacttaacatcaacca

SEQ ID NO: 6296 - DNA, 18 bp, Artificial Sequence
  Synthetic oligonucleotide
tgtacttaacatcaacca

SEQ ID NO: 6297 - DNA, 18 bp, Artificial Sequence
  Synthetic oligonucleotide
tgtacttaacatcaacca

SEQ ID NO: 6298 - DNA, 18 bp, Artificial Sequence
  Synthetic oligonucleotide
tgtacttaacatcaacca

SEQ ID NO: 6299 - DNA, 18 bp, Artificial Sequence
  Synthetic oligonucleotide
tgtacttaacatcaacca

SEQ ID NO: 6300 - DNA, 18 bp, Artificial Sequence
  Synthetic oligonucleotide
tgtacttaacatcaacca

SEQ ID NO: 6301 - DNA, 18 bp, Artificial Sequence
  Synthetic oligonucleotide
tgtacttaacatcaacca

SEQ ID NO: 6302 - DNA, 18 bp, Artificial Sequence
  Synthetic oligonucleotide
tgtacttaacatcaacca

SEQ ID NO: 6303 - DNA, 18 bp, Artificial Sequence
  Synthetic oligonucleotide
tgtacttaacatcaacca

SEQ ID NO: 6304 - DNA, 18 bp, Artificial Sequence
  Synthetic oligonucleotide
tgtacttaacatcaacca

SEQ ID NO: 6305 - DNA, 18 bp, Artificial Sequence
  Synthetic oligonucleotide
tgtacttaacatcaacca

SEQ ID NO: 6306 - DNA, 18 bp, Artificial Sequence
  Synthetic oligonucleotide
tgtacttaacatcaacca

SEQ ID NO: 6307 - DNA, 18 bp, Artificial Sequence
  Synthetic oligonucleotide
tgtacttaacatcaacca

SEQ ID NO: 6308 - DNA, 18 bp, Artificial Sequence
  Synthetic oligonucleotide
tgtacttaacatcaacca

SEQ ID NO: 6309 - DNA, 18 bp, Artificial Sequence
  Synthetic oligonucleotide
tgtacttaacatcaacca

SEQ ID NO: 6310 - DNA, 18 bp, Artificial Sequence
  Synthetic oligonucleotide
tgtacttaacatcaacca

SEQ ID NO: 6311 - DNA, 18 bp, Artificial Sequence
  Synthetic oligonucleotide
tgtacttaacatcaacca

SEQ ID NO: 6312 - DNA, 18 bp, Artificial Sequence
  Synthetic oligonucleotide
tgtacttaacatcaacca

SEQ ID NO: 6313 - DNA, 18 bp, Artificial Sequence
  Synthetic oligonucleotide
tgtacttaacatcaacca

SEQ ID NO: 6314 - DNA, 18 bp, Artificial Sequence
  Synthetic oligonucleotide
tgtacttaacatcaacca

SEQ ID NO: 6315 - DNA, 18 bp, Artificial Sequence
  Synthetic oligonucleotide
tgtacttaacatcaacca

SEQ ID NO: 6316 - DNA, 18 bp, Artificial Sequence
  Synthetic oligonucleotide
tgtacttaacatcaacca

SEQ ID NO: 6317 - DNA, 18 bp, Artificial Sequence
  Synthetic oligonucleotide
tgtacttaacatcaacca

SEQ ID NO: 6318 - DNA, 18 bp, Artificial Sequence
  Synthetic oligonucleotide
tgtacttaacatcaacca

SEQ ID NO: 6319 - DNA, 18 bp, Artificial Sequence
  Synthetic oligonucleotide
tgtacttaacatcaacca

SEQ ID NO: 6320 - DNA, 18 bp, Artificial Sequence
  Synthetic oligonucleotide
tgtacttaacatcaacca

SEQ ID NO: 6321 - DNA, 18 bp, Artificial Sequence
  Synthetic oligonucleotide
tgtacttaacatcaacca

SEQ ID NO: 6322 - DNA, 18 bp, Artificial Sequence
  Synthetic oligonucleotide
tgtacttaacatcaacca

SEQ ID NO: 6323 - DNA, 18 bp, Artificial Sequence
  Synthetic oligonucleotide
tgtacttaacatcaacca

SEQ ID NO: 6324 - DNA, 18 bp, Artificial Sequence
  Synthetic oligonucleotide
cagctacagttttgatga

SEQ ID NO: 6325 - DNA, 18 bp, Artificial Sequence
  Synthetic oligonucleotide
cagctacagttttgatga

SEQ ID NO: 6326 - DNA, 18 bp, Artificial Sequence
  Synthetic oligonucleotide
cagctacagttttgatga

SEQ ID NO: 6327 - DNA, 19 bp, Artificial Sequence
  Synthetic oligonucleotide
tgaaatattctgattctag

SEQ ID NO: 6328 - DNA, 16 bp, Artificial Sequence
  Synthetic oligonucleotide
caaggtttgttaccgg

SEQ ID NO: 6329 - DNA, 14 bp, Artificial Sequence
  Synthetic oligonucleotide
ccgatgagacttag

SEQ ID NO: 6330 - DNA, 15 bp, Artificial Sequence
  Synthetic oligonucleotide
ccgccgatgagactt

SEQ ID NO: 6331 - DNA, 17 bp, Artificial Sequence
  Synthetic oligonucleotide
aatggttctaaaaccga

SEQ ID NO: 6332 - DNA, 18 bp, Artificial Sequence
  Synthetic oligonucleotide
tttcggttttagaaccat

SEQ ID NO: 6333 - DNA, 18 bp, Artificial Sequence
  Synthetic oligonucleotide
tttcggttttagaaccat

SEQ ID NO: 6334 - DNA, 18 bp, Artificial Sequence
  Synthetic oligonucleotide
tttcggttttagaaccat

SEQ ID NO: 6335 - DNA, 18 bp, Artificial Sequence
  Synthetic oligonucleotide
tttcggttttagaaccat

SEQ ID NO: 6336 - DNA, 18 bp, Artificial Sequence
  Synthetic oligonucleotide
cagtagtgtcatcaatgt

SEQ ID NO: 6337 - DNA, 17 bp, Artificial Sequence
  Synthetic oligonucleotide
agtagtgtcatcaatgt

SEQ ID NO: 6338 - DNA, 13 bp, Artificial Sequence
  Synthetic oligonucleotide
agtgtcatcaatg

SEQ ID NO: 6339 - DNA, 17 bp, Artificial Sequence
  Synthetic oligonucleotide
cagagacattgatgaca

SEQ ID NO: 6340 - DNA, 18 bp, Artificial Sequence
  Synthetic oligonucleotide
acattgatgacactactg

SEQ ID NO: 6341 - DNA, 18 bp, Artificial Sequence
  Synthetic oligonucleotide
acattgatgacactactg

SEQ ID NO: 6342 - DNA, 18 bp, Artificial Sequence
  Synthetic oligonucleotide
acattgatgacactactg

SEQ ID NO: 6343 - DNA, 18 bp, Artificial Sequence
  Synthetic oligonucleotide
acattgatgacactactg

SEQ ID NO: 6344 - DNA, 18 bp, Artificial Sequence
  Synthetic oligonucleotide
acattgatgacactactg

SEQ ID NO: 6345 - DNA, 18 bp, Artificial Sequence
  Synthetic oligonucleotide
acattgatgacactactg

SEQ ID NO: 6346 - DNA, 18 bp, Artificial Sequence
  Synthetic oligonucleotide
acattgatgacactactg

SEQ ID NO: 6347 - DNA, 18 bp, Artificial Sequence
  Synthetic oligonucleotide
acattgatgacactactg

SEQ ID NO: 6348 - DNA, 18 bp, Artificial Sequence
  Synthetic oligonucleotide
acattgatgacactactg

SEQ ID NO: 6349 - DNA, 18 bp, Artificial Sequence
  Synthetic oligonucleotide
acattgatgacactactg

SEQ ID NO: 6350 - DNA, 18 bp, Artificial Sequence
  Synthetic oligonucleotide
acattgatgacactactg

SEQ ID NO: 6351 - DNA, 18 bp, Artificial Sequence
  Synthetic oligonucleotide
acattgatgacactactg

SEQ ID NO: 6352 - DNA, 18 bp, Artificial Sequence
  Synthetic oligonucleotide
acattgatgacactactg

SEQ ID NO: 6353 - DNA, 18 bp, Artificial Sequence
  Synthetic oligonucleotide
acattgatgacactactg

SEQ ID NO: 6354 - DNA, 18 bp, Artificial Sequence
  Synthetic oligonucleotide
acattgatgacactactg

SEQ ID NO: 6355 - DNA, 18 bp, Artificial Sequence
  Synthetic oligonucleotide
acattgatgacactactg

SEQ ID NO: 6356 - DNA, 18 bp, Artificial Sequence
  Synthetic oligonucleotide
acattgatgacactactg

SEQ ID NO: 6357 - DNA, 18 bp, Artificial Sequence
  Synthetic oligonucleotide
acattgatgacactactg

SEQ ID NO: 6358 - DNA, 18 bp, Artificial Sequence
  Synthetic oligonucleotide
acattgatgacactactg

SEQ ID NO: 6359 - DNA, 18 bp, Artificial Sequence
  Synthetic oligonucleotide
acattgatgacactactg

SEQ ID NO: 6360 - DNA, 18 bp, Artificial Sequence
  Synthetic oligonucleotide
acattgatgacactactg

SEQ ID NO: 6361 - DNA, 18 bp, Artificial Sequence
  Synthetic oligonucleotide
acattgatgacactactg

SEQ ID NO: 6362 - DNA, 18 bp, Artificial Sequence
  Synthetic oligonucleotide
acattgatgacactactg

SEQ ID NO: 6363 - DNA, 18 bp, Artificial Sequence
  Synthetic oligonucleotide
acattgatgacactactg

SEQ ID NO: 6364 - DNA, 18 bp, Artificial Sequence
  Synthetic oligonucleotide
acattgatgacactactg

SEQ ID NO: 6365 - DNA, 18 bp, Artificial Sequence
  Synthetic oligonucleotide
acattgatgacactactg

SEQ ID NO: 6366 - DNA, 18 bp, Artificial Sequence
  Synthetic oligonucleotide
acattgatgacactactg

SEQ ID NO: 6367 - DNA, 18 bp, Artificial Sequence
  Synthetic oligonucleotide
acattgatgacactactg

SEQ ID NO: 6368 - DNA, 18 bp, Artificial Sequence
  Synthetic oligonucleotide
acattgatgacactactg

SEQ ID NO: 6369 - DNA, 18 bp, Artificial Sequence
  Synthetic oligonucleotide
acattgatgacactactg

SEQ ID NO: 6370 - DNA, 18 bp, Artificial Sequence
  Synthetic oligonucleotide
acattgatgacactactg

SEQ ID NO: 6371 - DNA, 18 bp, Artificial Sequence
  Synthetic oligonucleotide
acattgatgacactactg

SEQ ID NO: 6372 - DNA, 18 bp, Artificial Sequence
  Synthetic oligonucleotide
acattgatgacactactg

SEQ ID NO: 6373 - DNA, 18 bp, Artificial Sequence
  Synthetic oligonucleotide
acattgatgacactactg

SEQ ID NO: 6374 - DNA, 18 bp, Artificial Sequence
  Synthetic oligonucleotide
acattgatgacactactg

SEQ ID NO: 6375 - DNA, 18 bp, Artificial Sequence
  Synthetic oligonucleotide
acattgatgacactactg

SEQ ID NO: 6376 - DNA, 18 bp, Artificial Sequence
  Synthetic oligonucleotide
acattgatgacactactg

SEQ ID NO: 6377 - DNA, 18 bp, Artificial Sequence
  Synthetic oligonucleotide
acattgatgacactactg

SEQ ID NO: 6378 - DNA, 18 bp, Artificial Sequence
  Synthetic oligonucleotide
acattgatgacactactg

SEQ ID NO: 6379 - DNA, 18 bp, Artificial Sequence
  Synthetic oligonucleotide
acattgatgacactactg

SEQ ID NO: 6380 - DNA, 18 bp, Artificial Sequence
  Synthetic oligonucleotide
acattgatgacactactg

SEQ ID NO: 6381 - DNA, 18 bp, Artificial Sequence
  Synthetic oligonucleotide
tggattgactaactacac

SEQ ID NO: 6382 - DNA, 21 bp, Artificial Sequence
  Synthetic oligonucleotide
aactgaattttctacaccaag

SEQ ID NO: 6383 - DNA, 18 bp, Artificial Sequence
  Synthetic oligonucleotide
ctgaattttctacaccaa

SEQ ID NO: 6384 - DNA, 18 bp, Artificial Sequence
  Synthetic oligonucleotide
ctgaattttctacaccaa

SEQ ID NO: 6385 - DNA, 13 bp, Artificial Sequence
  Synthetic oligonucleotide
ttggtgtagaaaa

SEQ ID NO: 6386 - DNA, 14 bp, Artificial Sequence
  Synthetic oligonucleotide
cttggtgtagaaaa

SEQ ID NO: 6387 - DNA, 18 bp, Artificial Sequence
  Synthetic oligonucleotide
ttggtgtagaaaattcag

SEQ ID NO: 6388 - DNA, 18 bp, Artificial Sequence
  Synthetic oligonucleotide
ttggtgtagaaaattcag

SEQ ID NO: 6389 - DNA, 18 bp, Artificial Sequence
  Synthetic oligonucleotide
ttggtgtagaaaattcag

SEQ ID NO: 6390 - DNA, 18 bp, Artificial Sequence
  Synthetic oligonucleotide
ttggtgtagaaaattcag

SEQ ID NO: 6391 - DNA, 18 bp, Artificial Sequence
  Synthetic oligonucleotide
ttggtgtagaaaattcag

SEQ ID NO: 6392 - DNA, 18 bp, Artificial Sequence
  Synthetic oligonucleotide
ttggtgtagaaaattcag

SEQ ID NO: 6393 - DNA, 18 bp, Artificial Sequence
  Synthetic oligonucleotide
ttggtgtagaaaattcag

SEQ ID NO: 6394 - DNA, 16 bp, Artificial Sequence
  Synthetic oligonucleotide
ttccatgttatctctg

SEQ ID NO: 6395 - DNA, 17 bp, Artificial Sequence
  Synthetic oligonucleotide
ccagagataaatggaac

SEQ ID NO: 6396 - DNA, 21 bp, Artificial Sequence
  Synthetic oligonucleotide
aggtttcaaactttacttcat

SEQ ID NO: 6397 - DNA, 19 bp, Artificial Sequence
  Synthetic oligonucleotide
tcattactacacacaacac

SEQ ID NO: 6398 - DNA, 17 bp, Artificial Sequence
  Synthetic oligonucleotide
cattactacacacaaca

SEQ ID NO: 6399 - DNA, 16 bp, Artificial Sequence
  Synthetic oligonucleotide
cattactacacacaac

SEQ ID NO: 6400 - DNA, 17 bp, Artificial Sequence
  Synthetic oligonucleotide
aaatgtgttgtgtgtag

SEQ ID NO: 6401 - DNA, 16 bp, Artificial Sequence
  Synthetic oligonucleotide
attactacacacaaca

SEQ ID NO: 6402 - DNA, 14 bp, Artificial Sequence
  Synthetic oligonucleotide
tgcgtggtctccct

SEQ ID NO: 6403 - DNA, 13 bp, Artificial Sequence
  Synthetic oligonucleotide
cgtggtctccctc

SEQ ID NO: 6404 - DNA, 15 bp, Artificial Sequence
  Synthetic oligonucleotide
tgagggagaccacgc

SEQ ID NO: 6405 - DNA, 13 bp, Artificial Sequence
  Synthetic oligonucleotide
tgcgtggtctccc

SEQ ID NO: 6406 - DNA, 15 bp, Artificial Sequence
  Synthetic oligonucleotide
tagtgcgtggtctcc

SEQ ID NO: 6407 - DNA, 17 bp, Artificial Sequence
  Synthetic oligonucleotide
ctgaagaagaaccacca

SEQ ID NO: 6408 - DNA, 17 bp, Artificial Sequence
  Synthetic oligonucleotide
ctgaagaagaaccacca

SEQ ID NO: 6409 - DNA, 17 bp, Artificial Sequence
  Synthetic oligonucleotide
ctgaagaagaaccacca

SEQ ID NO: 6410 - DNA, 17 bp, Artificial Sequence
  Synthetic oligonucleotide
tttatcagggtgttaac

SEQ ID NO: 6411 - DNA, 16 bp, Artificial Sequence
  Synthetic oligonucleotide
ttatcagggtgttaac

SEQ ID NO: 6412 - DNA, 20 bp, Artificial Sequence
  Synthetic oligonucleotide
cctaaacaatctaaacaggt

SEQ ID NO: 6413 - DNA, 17 bp, Artificial Sequence
  Synthetic oligonucleotide
atgcttcatttgtaaac

SEQ ID NO: 6414 - DNA, 17 bp, Artificial Sequence
  Synthetic oligonucleotide
tcagggtgttaactgca

SEQ ID NO: 6415 - DNA, 17 bp, Artificial Sequence
  Synthetic oligonucleotide
tcagggtgttaactgca

SEQ ID NO: 6416 - DNA, 17 bp, Artificial Sequence
  Synthetic oligonucleotide
tcagggtgttaactgca

SEQ ID NO: 6417 - DNA, 17 bp, Artificial Sequence
  Synthetic oligonucleotide
tcagggtgttaactgca

SEQ ID NO: 6418 - DNA, 17 bp, Artificial Sequence
  Synthetic oligonucleotide
tcagggtgttaactgca

SEQ ID NO: 6419 - DNA, 17 bp, Artificial Sequence
  Synthetic oligonucleotide
tcagggtgttaactgca

SEQ ID NO: 6420 - DNA, 17 bp, Artificial Sequence
  Synthetic oligonucleotide
tcagggtgttaactgca

SEQ ID NO: 6421 - DNA, 17 bp, Artificial Sequence
  Synthetic oligonucleotide
tcagggtgttaactgca

SEQ ID NO: 6422 - DNA, 17 bp, Artificial Sequence
  Synthetic oligonucleotide
tcagggtgttaactgca

SEQ ID NO: 6423 - DNA, 17 bp, Artificial Sequence
  Synthetic oligonucleotide
tcagggtgttaactgca

SEQ ID NO: 6424 - DNA, 17 bp, Artificial Sequence
  Synthetic oligonucleotide
tcagggtgttaactgca

SEQ ID NO: 6425 - DNA, 17 bp, Artificial Sequence
  Synthetic oligonucleotide
tcagggtgttaactgca

SEQ ID NO: 6426 - DNA, 17 bp, Artificial Sequence
  Synthetic oligonucleotide
tcagggtgttaactgca

SEQ ID NO: 6427 - DNA, 17 bp, Artificial Sequence
  Synthetic oligonucleotide
tcagggtgttaactgca

SEQ ID NO: 6428 - DNA, 17 bp, Artificial Sequence
  Synthetic oligonucleotide
tcagggtgttaactgca

SEQ ID NO: 6429 - DNA, 17 bp, Artificial Sequence
  Synthetic oligonucleotide
tcagggtgttaactgca

SEQ ID NO: 6430 - DNA, 17 bp, Artificial Sequence
  Synthetic oligonucleotide
tcagggtgttaactgca

SEQ ID NO: 6431 - DNA, 17 bp, Artificial Sequence
  Synthetic oligonucleotide
tcagggtgttaactgca

SEQ ID NO: 6432 - DNA, 17 bp, Artificial Sequence
  Synthetic oligonucleotide
tcagggtgttaactgca

SEQ ID NO: 6433 - DNA, 17 bp, Artificial Sequence
  Synthetic oligonucleotide
tcagggtgttaactgca

SEQ ID NO: 6434 - DNA, 17 bp, Artificial Sequence
  Synthetic oligonucleotide
tcagggtgttaactgca

SEQ ID NO: 6435 - DNA, 17 bp, Artificial Sequence
  Synthetic oligonucleotide
tcagggtgttaactgca

SEQ ID NO: 6436 - DNA, 17 bp, Artificial Sequence
  Synthetic oligonucleotide
tcagggtgttaactgca

SEQ ID NO: 6437 - DNA, 17 bp, Artificial Sequence
  Synthetic oligonucleotide
tcagggtgttaactgca

SEQ ID NO: 6438 - DNA, 17 bp, Artificial Sequence
  Synthetic oligonucleotide
tcagggtgttaactgca

SEQ ID NO: 6439 - DNA, 17 bp, Artificial Sequence
  Synthetic oligonucleotide
tcagggtgttaactgca

SEQ ID NO: 6440 - DNA, 17 bp, Artificial Sequence
  Synthetic oligonucleotide
tcagggtgttaactgca

SEQ ID NO: 6441 - DNA, 16 bp, Artificial Sequence
  Synthetic oligonucleotide
ccaattaaacattttg

SEQ ID NO: 6442 - DNA, 16 bp, Artificial Sequence
  Synthetic oligonucleotide
ccaattaaatattttg

SEQ ID NO: 6443 - DNA, 18 bp, Artificial Sequence
  Synthetic oligonucleotide
caccaattaaatattttg

SEQ ID NO: 6444 - DNA, 18 bp, Artificial Sequence
  Synthetic oligonucleotide
taggacagggttagcaaa

SEQ ID NO: 6445 - DNA, 15 bp, Artificial Sequence
  Synthetic oligonucleotide
aggtttgctaaccct

SEQ ID NO: 6446 - DNA, 14 bp, Artificial Sequence
  Synthetic oligonucleotide
agggttatcaaacc

SEQ ID NO: 6447 - DNA, 14 bp, Artificial Sequence
  Synthetic oligonucleotide
aggtttgctaaccc

SEQ ID NO: 6448 - DNA, 17 bp, Artificial Sequence
  Synthetic oligonucleotide
aggtttgctaaccctgt

SEQ ID NO: 6449 - DNA, 17 bp, Artificial Sequence
  Synthetic oligonucleotide
aggtttgctaaccctgt

SEQ ID NO: 6450 - DNA, 17 bp, Artificial Sequence
  Synthetic oligonucleotide
aggtttgctaaccctgt

SEQ ID NO: 6451 - DNA, 17 bp, Artificial Sequence
  Synthetic oligonucleotide
aggtttgctaaccctgt

SEQ ID NO: 6452 - DNA, 17 bp, Artificial Sequence
  Synthetic oligonucleotide
aggtttgctaaccctgt

SEQ ID NO: 6453 - DNA, 17 bp, Artificial Sequence
  Synthetic oligonucleotide
aggtttgctaaccctgt

SEQ ID NO: 6454 - DNA, 17 bp, Artificial Sequence
  Synthetic oligonucleotide
aggtttgctaaccctgt

SEQ ID NO: 6455 - DNA, 17 bp, Artificial Sequence
  Synthetic oligonucleotide
aggtttgctaaccctgt

SEQ ID NO: 6456 - DNA, 17 bp, Artificial Sequence
  Synthetic oligonucleotide
aggtttgctaaccctgt

SEQ ID NO: 6457 - DNA, 17 bp, Artificial Sequence
  Synthetic oligonucleotide
aggtttgctaaccctgt

SEQ ID NO: 6458 - DNA, 17 bp, Artificial Sequence
  Synthetic oligonucleotide
aggtttgctaaccctgt

SEQ ID NO: 6459 - DNA, 17 bp, Artificial Sequence
  Synthetic oligonucleotide
aggtttgctaaccctgt

SEQ ID NO: 6460 - DNA, 17 bp, Artificial Sequence
  Synthetic oligonucleotide
aggtttgctaaccctgt

SEQ ID NO: 6461 - DNA, 17 bp, Artificial Sequence
  Synthetic oligonucleotide
aggtttgctaaccctgt

SEQ ID NO: 6462 - DNA, 17 bp, Artificial Sequence
  Synthetic oligonucleotide
aggtttgctaaccctgt

SEQ ID NO: 6463 - DNA, 17 bp, Artificial Sequence
  Synthetic oligonucleotide
aggtttgctaaccctgt

SEQ ID NO: 6464 - DNA, 17 bp, Artificial Sequence
  Synthetic oligonucleotide
aggtttgctaaccctgt

SEQ ID NO: 6465 - DNA, 17 bp, Artificial Sequence
  Synthetic oligonucleotide
aggtttgctaaccctgt

SEQ ID NO: 6466 - DNA, 17 bp, Artificial Sequence
  Synthetic oligonucleotide
aggtttgctaaccctgt

SEQ ID NO: 6467 - DNA, 17 bp, Artificial Sequence
  Synthetic oligonucleotide
aggtttgctaaccctgt

SEQ ID NO: 6468 - DNA, 17 bp, Artificial Sequence
  Synthetic oligonucleotide
aggtttgctaaccctgt

SEQ ID NO: 6469 - DNA, 17 bp, Artificial Sequence
  Synthetic oligonucleotide
aggtttgctaaccctgt

SEQ ID NO: 6470 - DNA, 17 bp, Artificial Sequence
  Synthetic oligonucleotide
aggtttgctaaccctgt

SEQ ID NO: 6471 - DNA, 17 bp, Artificial Sequence
  Synthetic oligonucleotide
aggtttgctaaccctgt

SEQ ID NO: 6472 - DNA, 17 bp, Artificial Sequence
  Synthetic oligonucleotide
aggtttgctaaccctgt

SEQ ID NO: 6473 - DNA, 17 bp, Artificial Sequence
  Synthetic oligonucleotide
aggtttgctaaccctgt

SEQ ID NO: 6474 - DNA, 17 bp, Artificial Sequence
  Synthetic oligonucleotide
aggtttgctaaccctgt

SEQ ID NO: 6475 - DNA, 17 bp, Artificial Sequence
  Synthetic oligonucleotide
aggtttgctaaccctgt

SEQ ID NO: 6476 - DNA, 17 bp, Artificial Sequence
  Synthetic oligonucleotide
aggtttgctaaccctgt

SEQ ID NO: 6477 - DNA, 17 bp, Artificial Sequence
  Synthetic oligonucleotide
aggtttgctaaccctgt

SEQ ID NO: 6478 - DNA, 17 bp, Artificial Sequence
  Synthetic oligonucleotide
aggtttgctaaccctgt

SEQ ID NO: 6479 - DNA, 17 bp, Artificial Sequence
  Synthetic oligonucleotide
aggtttgctaaccctgt

SEQ ID NO: 6480 - DNA, 17 bp, Artificial Sequence
  Synthetic oligonucleotide
aggtttgctaaccctgt

SEQ ID NO: 6481 - DNA, 17 bp, Artificial Sequence
  Synthetic oligonucleotide
aggtttgctaaccctgt

SEQ ID NO: 6482 - DNA, 17 bp, Artificial Sequence
  Synthetic oligonucleotide
aggtttgctaaccctgt

SEQ ID NO: 6483 - DNA, 17 bp, Artificial Sequence
  Synthetic oligonucleotide
aggtttgctaaccctgt

SEQ ID NO: 6484 - DNA, 17 bp, Artificial Sequence
  Synthetic oligonucleotide
aggtttgctaaccctgt

SEQ ID NO: 6485 - DNA, 17 bp, Artificial Sequence
  Synthetic oligonucleotide
aggtttgctaaccctgt

SEQ ID NO: 6486 - DNA, 17 bp, Artificial Sequence
  Synthetic oligonucleotide
aggtttgctaaccctgt

SEQ ID NO: 6487 - DNA, 17 bp, Artificial Sequence
  Synthetic oligonucleotide
aggtttgctaaccctgt

SEQ ID NO: 6488 - DNA, 17 bp, Artificial Sequence
  Synthetic oligonucleotide
aggtttgctaaccctgt

SEQ ID NO: 6489 - DNA, 17 bp, Artificial Sequence
  Synthetic oligonucleotide
aggtttgctaaccctgt

SEQ ID NO: 6490 - DNA, 17 bp, Artificial Sequence
  Synthetic oligonucleotide
aggtttgctaaccctgt

SEQ ID NO: 6491 - DNA, 17 bp, Artificial Sequence
  Synthetic oligonucleotide
aggtttgctaaccctgt

SEQ ID NO: 6492 - DNA, 17 bp, Artificial Sequence
  Synthetic oligonucleotide
aggtttgctaaccctgt

SEQ ID NO: 6493 - DNA, 17 bp, Artificial Sequence
  Synthetic oligonucleotide
aggtttgctaaccctgt

SEQ ID NO: 6494 - DNA, 17 bp, Artificial Sequence
  Synthetic oligonucleotide
aggtttgctaaccctgt

SEQ ID NO: 6495 - DNA, 17 bp, Artificial Sequence
  Synthetic oligonucleotide
aggtttgctaaccctgt

SEQ ID NO: 6496 - DNA, 17 bp, Artificial Sequence
  Synthetic oligonucleotide
aggtttgctaaccctgt

SEQ ID NO: 6497 - DNA, 17 bp, Artificial Sequence
  Synthetic oligonucleotide
aggtttgctaaccctgt

SEQ ID NO: 6498 - DNA, 17 bp, Artificial Sequence
  Synthetic oligonucleotide
aggtttgctaaccctgt

SEQ ID NO: 6499 - DNA, 17 bp, Artificial Sequence
  Synthetic oligonucleotide
aggtttgctaaccctgt

SEQ ID NO: 6500 - DNA, 17 bp, Artificial Sequence
  Synthetic oligonucleotide
aggtttgctaaccctgt

SEQ ID NO: 6501 - DNA, 17 bp, Artificial Sequence
  Synthetic oligonucleotide
aggtttgctaaccctgt

SEQ ID NO: 6502 - DNA, 17 bp, Artificial Sequence
  Synthetic oligonucleotide
aggtttgctaaccctgt

SEQ ID NO: 6503 - DNA, 17 bp, Artificial Sequence
  Synthetic oligonucleotide
aggtttgctaaccctgt

SEQ ID NO: 6504 - DNA, 17 bp, Artificial Sequence
  Synthetic oligonucleotide
aggtttgctaaccctgt

SEQ ID NO: 6505 - DNA, 17 bp, Artificial Sequence
  Synthetic oligonucleotide
aggtttgctaaccctgt

SEQ ID NO: 6506 - DNA, 17 bp, Artificial Sequence
  Synthetic oligonucleotide
aggtttgctaaccctgt

SEQ ID NO: 6507 - DNA, 17 bp, Artificial Sequence
  Synthetic oligonucleotide
aggtttgctaaccctgt

SEQ ID NO: 6508 - DNA, 17 bp, Artificial Sequence
  Synthetic oligonucleotide
aggtttgctaaccctgt

SEQ ID NO: 6509 - DNA, 17 bp, Artificial Sequence
  Synthetic oligonucleotide
aggtttgctaaccctgt

SEQ ID NO: 6510 - DNA, 17 bp, Artificial Sequence
  Synthetic oligonucleotide
aggtttgctaaccctgt

SEQ ID NO: 6511 - DNA, 17 bp, Artificial Sequence
  Synthetic oligonucleotide
aggtttgctaaccctgt

SEQ ID NO: 6512 - DNA, 17 bp, Artificial Sequence
  Synthetic oligonucleotide
aggtttgctaaccctgt

SEQ ID NO: 6513 - DNA, 17 bp, Artificial Sequence
  Synthetic oligonucleotide
aggtttgctaaccctgt

SEQ ID NO: 6514 - DNA, 17 bp, Artificial Sequence
  Synthetic oligonucleotide
aggtttgctaaccctgt

SEQ ID NO: 6515 - DNA, 17 bp, Artificial Sequence
  Synthetic oligonucleotide
aggtttgctaaccctgt

SEQ ID NO: 6516 - DNA, 17 bp, Artificial Sequence
  Synthetic oligonucleotide
aggtttgctaaccctgt

SEQ ID NO: 6517 - DNA, 17 bp, Artificial Sequence
  Synthetic oligonucleotide
aggtttgctaaccctgt

SEQ ID NO: 6518 - DNA, 17 bp, Artificial Sequence
  Synthetic oligonucleotide
aggtttgctaaccctgt

SEQ ID NO: 6519 - DNA, 17 bp, Artificial Sequence
  Synthetic oligonucleotide
aggtttgctaaccctgt

SEQ ID NO: 6520 - DNA, 17 bp, Artificial Sequence
  Synthetic oligonucleotide
aggtttgctaaccctgt

SEQ ID NO: 6521 - DNA, 17 bp, Artificial Sequence
  Synthetic oligonucleotide
aggtttgctaaccctgt

SEQ ID NO: 6522 - DNA, 17 bp, Artificial Sequence
  Synthetic oligonucleotide
aggtttgctaaccctgt

SEQ ID NO: 6523 - DNA, 17 bp, Artificial Sequence
  Synthetic oligonucleotide
aggtttgctaaccctgt

SEQ ID NO: 6524 - DNA, 17 bp, Artificial Sequence
  Synthetic oligonucleotide
aggtttgctaaccctgt

SEQ ID NO: 6525 - DNA, 17 bp, Artificial Sequence
  Synthetic oligonucleotide
aggtttgctaaccctgt

SEQ ID NO: 6526 - DNA, 17 bp, Artificial Sequence
  Synthetic oligonucleotide
aggtttgctaaccctgt

SEQ ID NO: 6527 - DNA, 17 bp, Artificial Sequence
  Synthetic oligonucleotide
aggtttgctaaccctgt

SEQ ID NO: 6528 - DNA, 17 bp, Artificial Sequence
  Synthetic oligonucleotide
aggtttgctaaccctgt

SEQ ID NO: 6529 - DNA, 17 bp, Artificial Sequence
  Synthetic oligonucleotide
aggtttgctaaccctgt

SEQ ID NO: 6530 - DNA, 17 bp, Artificial Sequence
  Synthetic oligonucleotide
aggtttgctaaccctgt

SEQ ID NO: 6531 - DNA, 17 bp, Artificial Sequence
  Synthetic oligonucleotide
aggtttgctaaccctgt

SEQ ID NO: 6532 - DNA, 17 bp, Artificial Sequence
  Synthetic oligonucleotide
aggtttgctaaccctgt

SEQ ID NO: 6533 - DNA, 17 bp, Artificial Sequence
  Synthetic oligonucleotide
aggtttgctaaccctgt

SEQ ID NO: 6534 - DNA, 17 bp, Artificial Sequence
  Synthetic oligonucleotide
aggtttgctaaccctgt

SEQ ID NO: 6535 - DNA, 17 bp, Artificial Sequence
  Synthetic oligonucleotide
aggtttgctaaccctgt

SEQ ID NO: 6536 - DNA, 17 bp, Artificial Sequence
  Synthetic oligonucleotide
aggtttgctaaccctgt

SEQ ID NO: 6537 - DNA, 17 bp, Artificial Sequence
  Synthetic oligonucleotide
aggtttgctaaccctgt

SEQ ID NO: 6538 - DNA, 16 bp, Artificial Sequence
  Synthetic oligonucleotide
ttagtgggtcggaaac

SEQ ID NO: 6539 - DNA, 15 bp, Artificial Sequence
  Synthetic oligonucleotide
acagggttaccaaac

SEQ ID NO: 6540 - DNA, 15 bp, Artificial Sequence
  Synthetic oligonucleotide
acagggttaccaaac

SEQ ID NO: 6541 - DNA, 18 bp, Artificial Sequence
  Synthetic oligonucleotide
aaacttcaaaatgtggtc

SEQ ID NO: 6542 - DNA, 18 bp, Artificial Sequence
  Synthetic oligonucleotide
aaacttcaaaatgtggtc

SEQ ID NO: 6543 - DNA, 24 bp, Artificial Sequence
  Synthetic oligonucleotide
ctaggtttcaaactttacatagaa

SEQ ID NO: 6544 - DNA, 17 bp, Artificial Sequence
  Synthetic oligonucleotide
cttctatgtaaagtttg

SEQ ID NO: 6545 - DNA, 17 bp, Artificial Sequence
  Synthetic oligonucleotide
aaagcaagtaaagtttg

SEQ ID NO: 6546 - DNA, 17 bp, Artificial Sequence
  Synthetic oligonucleotide
aaagcaagtaaagtttg

SEQ ID NO: 6547 - DNA, 17 bp, Artificial Sequence
  Synthetic oligonucleotide
aaagcaagtaaagtttg

SEQ ID NO: 6548 - DNA, 17 bp, Artificial Sequence
  Synthetic oligonucleotide
aaagcaagtaaagtttg

SEQ ID NO: 6549 - DNA, 17 bp, Artificial Sequence
  Synthetic oligonucleotide
aaagcaagtaaagtttg

SEQ ID NO: 6550 - DNA, 17 bp, Artificial Sequence
  Synthetic oligonucleotide
aaagcaagtaaagtttg

SEQ ID NO: 6551 - DNA, 17 bp, Artificial Sequence
  Synthetic oligonucleotide
aaagcaagtaaagtttg

SEQ ID NO: 6552 - DNA, 17 bp, Artificial Sequence
  Synthetic oligonucleotide
aaagcaagtaaagtttg

SEQ ID NO: 6553 - DNA, 17 bp, Artificial Sequence
  Synthetic oligonucleotide
aaagcaagtaaagtttg

SEQ ID NO: 6554 - DNA, 17 bp, Artificial Sequence
  Synthetic oligonucleotide
aaagcaagtaaagtttg

SEQ ID NO: 6555 - DNA, 17 bp, Artificial Sequence
  Synthetic oligonucleotide
aaagcaagtaaagtttg

SEQ ID NO: 6556 - DNA, 17 bp, Artificial Sequence
  Synthetic oligonucleotide
aaagcaagtaaagtttg

SEQ ID NO: 6557 - DNA, 17 bp, Artificial Sequence
  Synthetic oligonucleotide
aaagcaagtaaagtttg

SEQ ID NO: 6558 - DNA, 17 bp, Artificial Sequence
  Synthetic oligonucleotide
aaagcaagtaaagtttg

SEQ ID NO: 6559 - DNA, 17 bp, Artificial Sequence
  Synthetic oligonucleotide
aaagcaagtaaagtttg

SEQ ID NO: 6560 - DNA, 16 bp, Artificial Sequence
  Synthetic oligonucleotide
tcccagagatagcatg

SEQ ID NO: 6561 - DNA, 18 bp, Artificial Sequence
  Synthetic oligonucleotide
catgctatctctgggacc

SEQ ID NO: 6562 - DNA, 18 bp, Artificial Sequence
  Synthetic oligonucleotide
catgctatctctgggacc

SEQ ID NO: 6563 - DNA, 18 bp, Artificial Sequence
  Synthetic oligonucleotide
acttctatgtaaagtttg

SEQ ID NO: 6564 - DNA, 15 bp, Artificial Sequence
  Synthetic oligonucleotide
ttgtggtaaacaccc

SEQ ID NO: 6565 - DNA, 16 bp, Artificial Sequence
  Synthetic oligonucleotide
cgtacagatcgagatc

SEQ ID NO: 6566 - DNA, 17 bp, Artificial Sequence
  Synthetic oligonucleotide
aatggtgttaaaggttt

SEQ ID NO: 6567 - DNA, 18 bp, Artificial Sequence
  Synthetic oligonucleotide
tggtgttaaaggttttaa

SEQ ID NO: 6568 - DNA, 18 bp, Artificial Sequence
  Synthetic oligonucleotide
tggtgttaaaggttttaa

SEQ ID NO: 6569 - DNA, 18 bp, Artificial Sequence
  Synthetic oligonucleotide
tggtgttaaaggttttaa

SEQ ID NO: 6570 - DNA, 18 bp, Artificial Sequence
  Synthetic oligonucleotide
tggtgttaaaggttttaa

SEQ ID NO: 6571 - DNA, 18 bp, Artificial Sequence
  Synthetic oligonucleotide
tggtgttaaaggttttaa

SEQ ID NO: 6572 - DNA, 18 bp, Artificial Sequence
  Synthetic oligonucleotide
tggtgttaaaggttttaa

SEQ ID NO: 6573 - DNA, 18 bp, Artificial Sequence
  Synthetic oligonucleotide
tggtgttaaaggttttaa

SEQ ID NO: 6574 - DNA, 18 bp, Artificial Sequence
  Synthetic oligonucleotide
tggtgttaaaggttttaa

SEQ ID NO: 6575 - DNA, 18 bp, Artificial Sequence
  Synthetic oligonucleotide
tggtgttaaaggttttaa

SEQ ID NO: 6576 - DNA, 18 bp, Artificial Sequence
  Synthetic oligonucleotide
tggtgttaaaggttttaa

SEQ ID NO: 6577 - DNA, 18 bp, Artificial Sequence
  Synthetic oligonucleotide
tggtgttaaaggttttaa

SEQ ID NO: 6578 - DNA, 18 bp, Artificial Sequence
  Synthetic oligonucleotide
tggtgttaaaggttttaa

SEQ ID NO: 6579 - DNA, 18 bp, Artificial Sequence
  Synthetic oligonucleotide
tggtgttaaaggttttaa

SEQ ID NO: 6580 - DNA, 18 bp, Artificial Sequence
  Synthetic oligonucleotide
tggtgttaaaggttttaa

SEQ ID NO: 6581 - DNA, 18 bp, Artificial Sequence
  Synthetic oligonucleotide
tggtgttaaaggttttaa

SEQ ID NO: 6582 - DNA, 18 bp, Artificial Sequence
  Synthetic oligonucleotide
tggtgttaaaggttttaa

SEQ ID NO: 6583 - DNA, 18 bp, Artificial Sequence
  Synthetic oligonucleotide
tggtgttaaaggttttaa

SEQ ID NO: 6584 - DNA, 18 bp, Artificial Sequence
  Synthetic oligonucleotide
tggtgttaaaggttttaa

SEQ ID NO: 6585 - DNA, 18 bp, Artificial Sequence
  Synthetic oligonucleotide
tggtgttaaaggttttaa

SEQ ID NO: 6586 - DNA, 18 bp, Artificial Sequence
  Synthetic oligonucleotide
tggtgttaaaggttttaa

SEQ ID NO: 6587 - DNA, 18 bp, Artificial Sequence
  Synthetic oligonucleotide
tggtgttaaaggttttaa

SEQ ID NO: 6588 - DNA, 18 bp, Artificial Sequence
  Synthetic oligonucleotide
tggtgttaaaggttttaa

SEQ ID NO: 6589 - DNA, 18 bp, Artificial Sequence
  Synthetic oligonucleotide
tggtgttaaaggttttaa

SEQ ID NO: 6590 - DNA, 18 bp, Artificial Sequence
  Synthetic oligonucleotide
tggtgttaaaggttttaa

SEQ ID NO: 6591 - DNA, 18 bp, Artificial Sequence
  Synthetic oligonucleotide
tggtgttaaaggttttaa

SEQ ID NO: 6592 - DNA, 18 bp, Artificial Sequence
  Synthetic oligonucleotide
tggtgttaaaggttttaa

SEQ ID NO: 6593 - DNA, 18 bp, Artificial Sequence
  Synthetic oligonucleotide
tggtgttaaaggttttaa

SEQ ID NO: 6594 - DNA, 18 bp, Artificial Sequence
  Synthetic oligonucleotide
tggtgttaaaggttttaa

SEQ ID NO: 6595 - DNA, 18 bp, Artificial Sequence
  Synthetic oligonucleotide
tggtgttaaaggttttaa

SEQ ID NO: 6596 - DNA, 15 bp, Artificial Sequence
  Synthetic oligonucleotide
tggtgttcaaggttt

SEQ ID NO: 6597 - DNA, 16 bp, Artificial Sequence
  Synthetic oligonucleotide
atggtgttcaaggttt

SEQ ID NO: 6598 - DNA, 15 bp, Artificial Sequence
  Synthetic oligonucleotide
cacttgacattcttg

SEQ ID NO: 6599 - DNA, 14 bp, Artificial Sequence
  Synthetic oligonucleotide
cacttgacattctt

SEQ ID NO: 6600 - DNA, 15 bp, Artificial Sequence
  Synthetic oligonucleotide
cacttgacattcttg

SEQ ID NO: 6601 - DNA, 14 bp, Artificial Sequence
  Synthetic oligonucleotide
cacttgacattctt

SEQ ID NO: 6602 - DNA, 18 bp, Artificial Sequence
  Synthetic oligonucleotide
agacacttgatattcttg

SEQ ID NO: 6603 - DNA, 16 bp, Artificial Sequence
  Synthetic oligonucleotide
acacttgatattcttg

SEQ ID NO: 6604 - DNA, 18 bp, Artificial Sequence
  Synthetic oligonucleotide
agacacttgatattcttg

SEQ ID NO: 6605 - DNA, 16 bp, Artificial Sequence
  Synthetic oligonucleotide
acacttgatattcttg

SEQ ID NO: 6606 - DNA, 20 bp, Artificial Sequence
  Synthetic oligonucleotide
cactagaataaacactttcc

SEQ ID NO: 6607 - DNA, 19 bp, Artificial Sequence
  Synthetic oligonucleotide
tagaataaactccactttc

SEQ ID NO: 6608 - DNA, 21 bp, Artificial Sequence
  Synthetic oligonucleotide
actagaataaactccactttc

SEQ ID NO: 6609 - DNA, 17 bp, Artificial Sequence
  Synthetic oligonucleotide
ataaactcttaactcac

SEQ ID NO: 6610 - DNA, 22 bp, Artificial Sequence
  Synthetic oligonucleotide
ctagaataaactcttaactcac

SEQ ID NO: 6611 - DNA, 20 bp, Artificial Sequence
  Synthetic oligonucleotide
agaataaactctggactcac

SEQ ID NO: 6612 - DNA, 15 bp, Artificial Sequence
  Synthetic oligonucleotide
aaactctggactcac

SEQ ID NO: 6613 - DNA, 17 bp, Artificial Sequence
  Synthetic oligonucleotide
ttgttactctcctttac

SEQ ID NO: 6614 - DNA, 14 bp, Artificial Sequence
  Synthetic oligonucleotide
tggacccttggtgc

SEQ ID NO: 6615 - DNA, 17 bp, Artificial Sequence
  Synthetic oligonucleotide
tggttggacccttggtg

SEQ ID NO: 6616 - DNA, 16 bp, Artificial Sequence
  Synthetic oligonucleotide
ccttttgatgaagttt

SEQ ID NO: 6617 - DNA, 17 bp, Artificial Sequence
  Synthetic oligonucleotide
ctaaggttgttggtaat

SEQ ID NO: 6618 - DNA, 16 bp, Artificial Sequence
  Synthetic oligonucleotide
ctttaactgtaatagc

SEQ ID NO: 6619 - DNA, 18 bp, Artificial Sequence
  Synthetic oligonucleotide
tgctttaactgtaatagc

SEQ ID NO: 6620 - DNA, 15 bp, Artificial Sequence
  Synthetic oligonucleotide
atagcatcgaaccaa

SEQ ID NO: 6621 - DNA, 19 bp, Artificial Sequence
  Synthetic oligonucleotide
atgtatagcatcgaaccaa

SEQ ID NO: 6622 - DNA, 16 bp, Artificial Sequence
  Synthetic oligonucleotide
tcccagagactatagc

SEQ ID NO: 6623 - DNA, 17 bp, Artificial Sequence
  Synthetic oligonucleotide
ttggtcccagatatagc

SEQ ID NO: 6624 - DNA, 19 bp, Artificial Sequence
  Synthetic oligonucleotide
tgacaattcctactacaac

SEQ ID NO: 6625 - DNA, 16 bp, Artificial Sequence
  Synthetic oligonucleotide
actggaaacattgctg

SEQ ID NO: 6626 - DNA, 18 bp, Artificial Sequence
  Synthetic oligonucleotide
tggaaacattgctgatta

SEQ ID NO: 6627 - DNA, 18 bp, Artificial Sequence
  Synthetic oligonucleotide
tggaaacattgctgatta

SEQ ID NO: 6628 - DNA, 18 bp, Artificial Sequence
  Synthetic oligonucleotide
tggaaacattgctgatta

SEQ ID NO: 6629 - DNA, 18 bp, Artificial Sequence
  Synthetic oligonucleotide
tggaaacattgctgatta

SEQ ID NO: 6630 - DNA, 18 bp, Artificial Sequence
  Synthetic oligonucleotide
tggaaacattgctgatta

SEQ ID NO: 6631 - DNA, 18 bp, Artificial Sequence
  Synthetic oligonucleotide
tggaaacattgctgatta

SEQ ID NO: 6632 - DNA, 18 bp, Artificial Sequence
  Synthetic oligonucleotide
tggaaacattgctgatta

SEQ ID NO: 6633 - DNA, 18 bp, Artificial Sequence
  Synthetic oligonucleotide
tggaaacattgctgatta

SEQ ID NO: 6634 - DNA, 18 bp, Artificial Sequence
  Synthetic oligonucleotide
tggaaacattgctgatta

SEQ ID NO: 6635 - DNA, 18 bp, Artificial Sequence
  Synthetic oligonucleotide
tggaaacattgctgatta

SEQ ID NO: 6636 - DNA, 18 bp, Artificial Sequence
  Synthetic oligonucleotide
tggaaacattgctgatta

SEQ ID NO: 6637 - DNA, 18 bp, Artificial Sequence
  Synthetic oligonucleotide
tggaaacattgctgatta

SEQ ID NO: 6638 - DNA, 18 bp, Artificial Sequence
  Synthetic oligonucleotide
tggaaacattgctgatta

SEQ ID NO: 6639 - DNA, 18 bp, Artificial Sequence
  Synthetic oligonucleotide
tggaaacattgctgatta

SEQ ID NO: 6640 - DNA, 18 bp, Artificial Sequence
  Synthetic oligonucleotide
tggaaacattgctgatta

SEQ ID NO: 6641 - DNA, 18 bp, Artificial Sequence
  Synthetic oligonucleotide
tggaaacattgctgatta

SEQ ID NO: 6642 - DNA, 18 bp, Artificial Sequence
  Synthetic oligonucleotide
tggaaacattgctgatta

SEQ ID NO: 6643 - DNA, 18 bp, Artificial Sequence
  Synthetic oligonucleotide
tggaaacattgctgatta

SEQ ID NO: 6644 - DNA, 18 bp, Artificial Sequence
  Synthetic oligonucleotide
tggaaacattgctgatta

SEQ ID NO: 6645 - DNA, 18 bp, Artificial Sequence
  Synthetic oligonucleotide
tggaaacattgctgatta

SEQ ID NO: 6646 - DNA, 18 bp, Artificial Sequence
  Synthetic oligonucleotide
tggaaacattgctgatta

SEQ ID NO: 6647 - DNA, 18 bp, Artificial Sequence
  Synthetic oligonucleotide
tggaaacattgctgatta

SEQ ID NO: 6648 - DNA, 18 bp, Artificial Sequence
  Synthetic oligonucleotide
tggaaacattgctgatta

SEQ ID NO: 6649 - DNA, 18 bp, Artificial Sequence
  Synthetic oligonucleotide
tggaaacattgctgatta

SEQ ID NO: 6650 - DNA, 18 bp, Artificial Sequence
  Synthetic oligonucleotide
tggaaacattgctgatta

SEQ ID NO: 6651 - DNA, 18 bp, Artificial Sequence
  Synthetic oligonucleotide
tggaaacattgctgatta

SEQ ID NO: 6652 - DNA, 18 bp, Artificial Sequence
  Synthetic oligonucleotide
tggaaacattgctgatta

SEQ ID NO: 6653 - DNA, 18 bp, Artificial Sequence
  Synthetic oligonucleotide
tggaaacattgctgatta

SEQ ID NO: 6654 - DNA, 18 bp, Artificial Sequence
  Synthetic oligonucleotide
tggaaacattgctgatta

SEQ ID NO: 6655 - DNA, 18 bp, Artificial Sequence
  Synthetic oligonucleotide
tggaaacattgctgatta

SEQ ID NO: 6656 - DNA, 18 bp, Artificial Sequence
  Synthetic oligonucleotide
tggaaacattgctgatta

SEQ ID NO: 6657 - DNA, 18 bp, Artificial Sequence
  Synthetic oligonucleotide
tggaaacattgctgatta

SEQ ID NO: 6658 - DNA, 18 bp, Artificial Sequence
  Synthetic oligonucleotide
tggaaacattgctgatta

SEQ ID NO: 6659 - DNA, 18 bp, Artificial Sequence
  Synthetic oligonucleotide
tggaaacattgctgatta

SEQ ID NO: 6660 - DNA, 18 bp, Artificial Sequence
  Synthetic oligonucleotide
tggaaacattgctgatta

SEQ ID NO: 6661 - DNA, 18 bp, Artificial Sequence
  Synthetic oligonucleotide
tggaaacattgctgatta

SEQ ID NO: 6662 - DNA, 18 bp, Artificial Sequence
  Synthetic oligonucleotide
tggaaacattgctgatta

SEQ ID NO: 6663 - DNA, 18 bp, Artificial Sequence
  Synthetic oligonucleotide
tggaaacattgctgatta

SEQ ID NO: 6664 - DNA, 18 bp, Artificial Sequence
  Synthetic oligonucleotide
tggaaacattgctgatta

SEQ ID NO: 6665 - DNA, 18 bp, Artificial Sequence
  Synthetic oligonucleotide
tggaaacattgctgatta

SEQ ID NO: 6666 - DNA, 18 bp, Artificial Sequence
  Synthetic oligonucleotide
tggaaacattgctgatta

SEQ ID NO: 6667 - DNA, 18 bp, Artificial Sequence
  Synthetic oligonucleotide
tggaaacattgctgatta

SEQ ID NO: 6668 - DNA, 18 bp, Artificial Sequence
  Synthetic oligonucleotide
tggaaacattgctgatta

SEQ ID NO: 6669 - DNA, 18 bp, Artificial Sequence
  Synthetic oligonucleotide
tggaaacattgctgatta

SEQ ID NO: 6670 - DNA, 18 bp, Artificial Sequence
  Synthetic oligonucleotide
tggaaacattgctgatta

SEQ ID NO: 6671 - DNA, 18 bp, Artificial Sequence
  Synthetic oligonucleotide
tggaaacattgctgatta

SEQ ID NO: 6672 - DNA, 18 bp, Artificial Sequence
  Synthetic oligonucleotide
tggaaacattgctgatta

SEQ ID NO: 6673 - DNA, 18 bp, Artificial Sequence
  Synthetic oligonucleotide
tggaaacattgctgatta

SEQ ID NO: 6674 - DNA, 18 bp, Artificial Sequence
  Synthetic oligonucleotide
tggaaacattgctgatta

SEQ ID NO: 6675 - DNA, 18 bp, Artificial Sequence
  Synthetic oligonucleotide
tggaaacattgctgatta

SEQ ID NO: 6676 - DNA, 18 bp, Artificial Sequence
  Synthetic oligonucleotide
tggaaacattgctgatta

SEQ ID NO: 6677 - DNA, 18 bp, Artificial Sequence
  Synthetic oligonucleotide
tggaaacattgctgatta

SEQ ID NO: 6678 - DNA, 18 bp, Artificial Sequence
  Synthetic oligonucleotide
tggaaacattgctgatta

SEQ ID NO: 6679 - DNA, 18 bp, Artificial Sequence
  Synthetic oligonucleotide
tggaaacattgctgatta

SEQ ID NO: 6680 - DNA, 18 bp, Artificial Sequence
  Synthetic oligonucleotide
tggaaacattgctgatta

SEQ ID NO: 6681 - DNA, 18 bp, Artificial Sequence
  Synthetic oligonucleotide
tggaaacattgctgatta

SEQ ID NO: 6682 - DNA, 18 bp, Artificial Sequence
  Synthetic oligonucleotide
tggaaacattgctgatta

SEQ ID NO: 6683 - DNA, 18 bp, Artificial Sequence
  Synthetic oligonucleotide
tggaaacattgctgatta

SEQ ID NO: 6684 - DNA, 18 bp, Artificial Sequence
  Synthetic oligonucleotide
tggaaacattgctgatta

SEQ ID NO: 6685 - DNA, 18 bp, Artificial Sequence
  Synthetic oligonucleotide
tggaaacattgctgatta

SEQ ID NO: 6686 - DNA, 18 bp, Artificial Sequence
  Synthetic oligonucleotide
tggaaacattgctgatta

SEQ ID NO: 6687 - DNA, 18 bp, Artificial Sequence
  Synthetic oligonucleotide
tggaaacattgctgatta

SEQ ID NO: 6688 - DNA, 18 bp, Artificial Sequence
  Synthetic oligonucleotide
tggaaacattgctgatta

SEQ ID NO: 6689 - DNA, 18 bp, Artificial Sequence
  Synthetic oligonucleotide
tggaaacattgctgatta

SEQ ID NO: 6690 - DNA, 18 bp, Artificial Sequence
  Synthetic oligonucleotide
tggaaacattgctgatta

SEQ ID NO: 6691 - DNA, 18 bp, Artificial Sequence
  Synthetic oligonucleotide
tggaaacattgctgatta

SEQ ID NO: 6692 - DNA, 18 bp, Artificial Sequence
  Synthetic oligonucleotide
tggaaacattgctgatta

SEQ ID NO: 6693 - DNA, 19 bp, Artificial Sequence
  Synthetic oligonucleotide
caaactggaaatattgctg

SEQ ID NO: 6694 - DNA, 18 bp, Artificial Sequence
  Synthetic oligonucleotide
ctggaaatattgctgatt

SEQ ID NO: 6695 - DNA, 18 bp, Artificial Sequence
  Synthetic oligonucleotide
ctggaaatattgctgatt

SEQ ID NO: 6696 - DNA, 18 bp, Artificial Sequence
  Synthetic oligonucleotide
ctggaaatattgctgatt

SEQ ID NO: 6697 - DNA, 18 bp, Artificial Sequence
  Synthetic oligonucleotide
ctggaaatattgctgatt

SEQ ID NO: 6698 - DNA, 18 bp, Artificial Sequence
  Synthetic oligonucleotide
ctggaaatattgctgatt

SEQ ID NO: 6699 - DNA, 18 bp, Artificial Sequence
  Synthetic oligonucleotide
ctggaaatattgctgatt

SEQ ID NO: 6700 - DNA, 18 bp, Artificial Sequence
  Synthetic oligonucleotide
ctggaaatattgctgatt

SEQ ID NO: 6701 - DNA, 18 bp, Artificial Sequence
  Synthetic oligonucleotide
ctggaaatattgctgatt

SEQ ID NO: 6702 - DNA, 18 bp, Artificial Sequence
  Synthetic oligonucleotide
ctggaaatattgctgatt

SEQ ID NO: 6703 - DNA, 18 bp, Artificial Sequence
  Synthetic oligonucleotide
ctggaaatattgctgatt

SEQ ID NO: 6704 - DNA, 18 bp, Artificial Sequence
  Synthetic oligonucleotide
ctggaaatattgctgatt

SEQ ID NO: 6705 - DNA, 18 bp, Artificial Sequence
  Synthetic oligonucleotide
ctggaaatattgctgatt

SEQ ID NO: 6706 - DNA, 18 bp, Artificial Sequence
  Synthetic oligonucleotide
ctggaaatattgctgatt

SEQ ID NO: 6707 - DNA, 18 bp, Artificial Sequence
  Synthetic oligonucleotide
ctggaaatattgctgatt

SEQ ID NO: 6708 - DNA, 18 bp, Artificial Sequence
  Synthetic oligonucleotide
ctggaaatattgctgatt

SEQ ID NO: 6709 - DNA, 18 bp, Artificial Sequence
  Synthetic oligonucleotide
ctggaaatattgctgatt

SEQ ID NO: 6710 - DNA, 18 bp, Artificial Sequence
  Synthetic oligonucleotide
ctggaaatattgctgatt

SEQ ID NO: 6711 - DNA, 18 bp, Artificial Sequence
  Synthetic oligonucleotide
ctggaaatattgctgatt

SEQ ID NO: 6712 - DNA, 18 bp, Artificial Sequence
  Synthetic oligonucleotide
ctggaaatattgctgatt

SEQ ID NO: 6713 - DNA, 18 bp, Artificial Sequence
  Synthetic oligonucleotide
ctggaaatattgctgatt

SEQ ID NO: 6714 - DNA, 18 bp, Artificial Sequence
  Synthetic oligonucleotide
ctggaaatattgctgatt

SEQ ID NO: 6715 - DNA, 18 bp, Artificial Sequence
  Synthetic oligonucleotide
ctggaaatattgctgatt

SEQ ID NO: 6716 - DNA, 18 bp, Artificial Sequence
  Synthetic oligonucleotide
ctggaaatattgctgatt

SEQ ID NO: 6717 - DNA, 18 bp, Artificial Sequence
  Synthetic oligonucleotide
ctggaaatattgctgatt

SEQ ID NO: 6718 - DNA, 18 bp, Artificial Sequence
  Synthetic oligonucleotide
ctggaaatattgctgatt

SEQ ID NO: 6719 - DNA, 18 bp, Artificial Sequence
  Synthetic oligonucleotide
ctggaaatattgctgatt

SEQ ID NO: 6720 - DNA, 18 bp, Artificial Sequence
  Synthetic oligonucleotide
ctggaaatattgctgatt

SEQ ID NO: 6721 - DNA, 18 bp, Artificial Sequence
  Synthetic oligonucleotide
ctggaaatattgctgatt

SEQ ID NO: 6722 - DNA, 18 bp, Artificial Sequence
  Synthetic oligonucleotide
ctggaaatattgctgatt

SEQ ID NO: 6723 - DNA, 18 bp, Artificial Sequence
  Synthetic oligonucleotide
ctggaaatattgctgatt

SEQ ID NO: 6724 - DNA, 18 bp, Artificial Sequence
  Synthetic oligonucleotide
ctggaaatattgctgatt

SEQ ID NO: 6725 - DNA, 18 bp, Artificial Sequence
  Synthetic oligonucleotide
ctggaaatattgctgatt

SEQ ID NO: 6726 - DNA, 18 bp, Artificial Sequence
  Synthetic oligonucleotide
ctggaaatattgctgatt

SEQ ID NO: 6727 - DNA, 18 bp, Artificial Sequence
  Synthetic oligonucleotide
ctggaaatattgctgatt

SEQ ID NO: 6728 - DNA, 18 bp, Artificial Sequence
  Synthetic oligonucleotide
ctggaaatattgctgatt

SEQ ID NO: 6729 - DNA, 18 bp, Artificial Sequence
  Synthetic oligonucleotide
ctggaaatattgctgatt

SEQ ID NO: 6730 - DNA, 18 bp, Artificial Sequence
  Synthetic oligonucleotide
ctggaaatattgctgatt

SEQ ID NO: 6731 - DNA, 18 bp, Artificial Sequence
  Synthetic oligonucleotide
ctggaaatattgctgatt

SEQ ID NO: 6732 - DNA, 18 bp, Artificial Sequence
  Synthetic oligonucleotide
ctggaaatattgctgatt

SEQ ID NO: 6733 - DNA, 18 bp, Artificial Sequence
  Synthetic oligonucleotide
ctggaaatattgctgatt

SEQ ID NO: 6734 - DNA, 18 bp, Artificial Sequence
  Synthetic oligonucleotide
ctggaaatattgctgatt

SEQ ID NO: 6735 - DNA, 18 bp, Artificial Sequence
  Synthetic oligonucleotide
ctggaaatattgctgatt

SEQ ID NO: 6736 - DNA, 18 bp, Artificial Sequence
  Synthetic oligonucleotide
ctggaaatattgctgatt

SEQ ID NO: 6737 - DNA, 18 bp, Artificial Sequence
  Synthetic oligonucleotide
ctggaaatattgctgatt

SEQ ID NO: 6738 - DNA, 18 bp, Artificial Sequence
  Synthetic oligonucleotide
ctggaaatattgctgatt

SEQ ID NO: 6739 - DNA, 18 bp, Artificial Sequence
  Synthetic oligonucleotide
ctggaaatattgctgatt

SEQ ID NO: 6740 - DNA, 18 bp, Artificial Sequence
  Synthetic oligonucleotide
ctggaaatattgctgatt

SEQ ID NO: 6741 - DNA, 18 bp, Artificial Sequence
  Synthetic oligonucleotide
ctggaaatattgctgatt

SEQ ID NO: 6742 - DNA, 18 bp, Artificial Sequence
  Synthetic oligonucleotide
ctggaaatattgctgatt

SEQ ID NO: 6743 - DNA, 18 bp, Artificial Sequence
  Synthetic oligonucleotide
ctggaaatattgctgatt

SEQ ID NO: 6744 - DNA, 18 bp, Artificial Sequence
  Synthetic oligonucleotide
ctggaaatattgctgatt

SEQ ID NO: 6745 - DNA, 18 bp, Artificial Sequence
  Synthetic oligonucleotide
ctggaaatattgctgatt

SEQ ID NO: 6746 - DNA, 18 bp, Artificial Sequence
  Synthetic oligonucleotide
ctggaaatattgctgatt

SEQ ID NO: 6747 - DNA, 18 bp, Artificial Sequence
  Synthetic oligonucleotide
ctggaaatattgctgatt

SEQ ID NO: 6748 - DNA, 18 bp, Artificial Sequence
  Synthetic oligonucleotide
ctggaaatattgctgatt

SEQ ID NO: 6749 - DNA, 18 bp, Artificial Sequence
  Synthetic oligonucleotide
ctggaaatattgctgatt

SEQ ID NO: 6750 - DNA, 18 bp, Artificial Sequence
  Synthetic oligonucleotide
ctggaaatattgctgatt

SEQ ID NO: 6751 - DNA, 16 bp, Artificial Sequence
  Synthetic oligonucleotide
aaactggaacgattgc

SEQ ID NO: 6752 - DNA, 17 bp, Artificial Sequence
  Synthetic oligonucleotide
tcttgattctcaggttg

SEQ ID NO: 6753 - DNA, 16 bp, Artificial Sequence
  Synthetic oligonucleotide
tggttgtaaaattaac

SEQ ID NO: 6754 - DNA, 16 bp, Artificial Sequence
  Synthetic oligonucleotide
ctggttgtacgattaa

SEQ ID NO: 6755 - DNA, 16 bp, Artificial Sequence
  Synthetic oligonucleotide
ctggttgtacgattaa

SEQ ID NO: 6756 - DNA, 16 bp, Artificial Sequence
  Synthetic oligonucleotide
ctggttgtacgattaa

SEQ ID NO: 6757 - DNA, 20 bp, Artificial Sequence
  Synthetic oligonucleotide
ttctatgtaaagctaaagtt

SEQ ID NO: 6758 - DNA, 18 bp, Artificial Sequence
  Synthetic oligonucleotide
tgtaaagcatgtaaagtt

SEQ ID NO: 6759 - DNA, 18 bp, Artificial Sequence
  Synthetic oligonucleotide
caaactttacatgcttta

SEQ ID NO: 6760 - DNA, 18 bp, Artificial Sequence
  Synthetic oligonucleotide
actttacatgctttacat

SEQ ID NO: 6761 - DNA, 18 bp, Artificial Sequence
  Synthetic oligonucleotide
actttacatgctttacat

SEQ ID NO: 6762 - DNA, 18 bp, Artificial Sequence
  Synthetic oligonucleotide
actttacatgctttacat

SEQ ID NO: 6763 - DNA, 18 bp, Artificial Sequence
  Synthetic oligonucleotide
actttacatgctttacat

SEQ ID NO: 6764 - DNA, 18 bp, Artificial Sequence
  Synthetic oligonucleotide
actttacatgctttacat

SEQ ID NO: 6765 - DNA, 18 bp, Artificial Sequence
  Synthetic oligonucleotide
actttacatgctttacat

SEQ ID NO: 6766 - DNA, 18 bp, Artificial Sequence
  Synthetic oligonucleotide
actttacatgctttacat

SEQ ID NO: 6767 - DNA, 18 bp, Artificial Sequence
  Synthetic oligonucleotide
actttacatgctttacat

SEQ ID NO: 6768 - DNA, 18 bp, Artificial Sequence
  Synthetic oligonucleotide
actttacatgctttacat

SEQ ID NO: 6769 - DNA, 18 bp, Artificial Sequence
  Synthetic oligonucleotide
actttacatgctttacat

SEQ ID NO: 6770 - DNA, 18 bp, Artificial Sequence
  Synthetic oligonucleotide
actttacatgctttacat

SEQ ID NO: 6771 - DNA, 18 bp, Artificial Sequence
  Synthetic oligonucleotide
actttacatgctttacat

SEQ ID NO: 6772 - DNA, 18 bp, Artificial Sequence
  Synthetic oligonucleotide
actttacatgctttacat

SEQ ID NO: 6773 - DNA, 18 bp, Artificial Sequence
  Synthetic oligonucleotide
actttacatgctttacat

SEQ ID NO: 6774 - DNA, 18 bp, Artificial Sequence
  Synthetic oligonucleotide
actttacatgctttacat

SEQ ID NO: 6775 - DNA, 18 bp, Artificial Sequence
  Synthetic oligonucleotide
actttacatgctttacat

SEQ ID NO: 6776 - DNA, 18 bp, Artificial Sequence
  Synthetic oligonucleotide
actttacatgctttacat

SEQ ID NO: 6777 - DNA, 18 bp, Artificial Sequence
  Synthetic oligonucleotide
actttacatgctttacat

SEQ ID NO: 6778 - DNA, 18 bp, Artificial Sequence
  Synthetic oligonucleotide
actttacatgctttacat

SEQ ID NO: 6779 - DNA, 18 bp, Artificial Sequence
  Synthetic oligonucleotide
actttacatgctttacat

SEQ ID NO: 6780 - DNA, 18 bp, Artificial Sequence
  Synthetic oligonucleotide
actttacatgctttacat

SEQ ID NO: 6781 - DNA, 18 bp, Artificial Sequence
  Synthetic oligonucleotide
actttacatgctttacat

SEQ ID NO: 6782 - DNA, 18 bp, Artificial Sequence
  Synthetic oligonucleotide
caatctatactggtaatt

SEQ ID NO: 6783 - DNA, 20 bp, Artificial Sequence
  Synthetic oligonucleotide
caatctatactggtaattat

SEQ ID NO: 6784 - DNA, 18 bp, Artificial Sequence
  Synthetic oligonucleotide
atgcttcatttgtaaaca

SEQ ID NO: 6785 - DNA, 17 bp, Artificial Sequence
  Synthetic oligonucleotide
caagatttttagaattc

SEQ ID NO: 6786 - DNA, 17 bp, Artificial Sequence
  Synthetic oligonucleotide
caagattcttagaattc

SEQ ID NO: 6787 - DNA, 18 bp, Artificial Sequence
  Synthetic oligonucleotide
tagaatcaagcttgttag

SEQ ID NO: 6788 - DNA, 19 bp, Artificial Sequence
  Synthetic oligonucleotide
ccttagaatcaagcttgtt

SEQ ID NO: 6789 - DNA, 19 bp, Artificial Sequence
  Synthetic oligonucleotide
tctatacaggtacttataa

SEQ ID NO: 6790 - DNA, 17 bp, Artificial Sequence
  Synthetic oligonucleotide
tacaggtacttataatt

SEQ ID NO: 6791 - DNA, 19 bp, Artificial Sequence
  Synthetic oligonucleotide
tctatacaggtacttataa

SEQ ID NO: 6792 - DNA, 21 bp, Artificial Sequence
  Synthetic oligonucleotide
acaatctatacaggtacttat

SEQ ID NO: 6793 - DNA, 17 bp, Artificial Sequence
  Synthetic oligonucleotide
aggtttgagcttagact

SEQ ID NO: 6794 - DNA, 19 bp, Artificial Sequence
  Synthetic oligonucleotide
aaaaggtttgagcttagac

SEQ ID NO: 6795 - DNA, 13 bp, Artificial Sequence
  Synthetic oligonucleotide
ccggtaacacacc

SEQ ID NO: 6796 - DNA, 15 bp, Artificial Sequence
  Synthetic oligonucleotide
ccggtaacacacctt

SEQ ID NO: 6797 - DNA, 18 bp, Artificial Sequence
  Synthetic oligonucleotide
aaggtttgagtttagact

SEQ ID NO: 6798 - DNA, 17 bp, Artificial Sequence
  Synthetic oligonucleotide
aggtttgagcttagact

SEQ ID NO: 6799 - DNA, 18 bp, Artificial Sequence
  Synthetic oligonucleotide
taggaagtctactctcaa

SEQ ID NO: 6800 - DNA, 18 bp, Artificial Sequence
  Synthetic oligonucleotide
taggaagtctactctcaa

SEQ ID NO: 6801 - DNA, 16 bp, Artificial Sequence
  Synthetic oligonucleotide
aacccactactggtgt

SEQ ID NO: 6802 - DNA, 16 bp, Artificial Sequence
  Synthetic oligonucleotide
aacccactactggtgt

SEQ ID NO: 6803 - DNA, 17 bp, Artificial Sequence
  Synthetic oligonucleotide
ccaacccacttatggtg

SEQ ID NO: 6804 - DNA, 17 bp, Artificial Sequence
  Synthetic oligonucleotide
ccaacccacttatggtg

SEQ ID NO: 6805 - DNA, 16 bp, Artificial Sequence
  Synthetic oligonucleotide
caacccacttatggtg

SEQ ID NO: 6806 - DNA, 15 bp, Artificial Sequence
  Synthetic oligonucleotide
caacaccataagtgg

SEQ ID NO: 6807 - DNA, 15 bp, Artificial Sequence
  Synthetic oligonucleotide
caacaccataagtgg

SEQ ID NO: 6808 - DNA, 14 bp, Artificial Sequence
  Synthetic oligonucleotide
acccacttatggtg

SEQ ID NO: 6809 - DNA, 14 bp, Artificial Sequence
  Synthetic oligonucleotide
acccacttatggtg

SEQ ID NO: 6810 - DNA, 15 bp, Artificial Sequence
  Synthetic oligonucleotide
cgatgagacttagtc

SEQ ID NO: 6811 - DNA, 14 bp, Artificial Sequence
  Synthetic oligonucleotide
ccgatgagacttag

SEQ ID NO: 6812 - DNA, 15 bp, Artificial Sequence
  Synthetic oligonucleotide
ccgccgatgagactt

SEQ ID NO: 6813 - DNA, 16 bp, Artificial Sequence
  Synthetic oligonucleotide
aaagcacgttttaatt

SEQ ID NO: 6814 - DNA, 13 bp, Artificial Sequence
  Synthetic oligonucleotide
aaggcctttaaac

SEQ ID NO: 6815 - DNA, 17 bp, Artificial Sequence
  Synthetic oligonucleotide
cagtaaggcctttaaac

SEQ ID NO: 6816 - DNA, 14 bp, Artificial Sequence
  Synthetic oligonucleotide
caccaaatttggag

SEQ ID NO: 6817 - DNA, 17 bp, Artificial Sequence
  Synthetic oligonucleotide
ttgcaccaaatttggag

SEQ ID NO: 6818 - DNA, 18 bp, Artificial Sequence
  Synthetic oligonucleotide
ctcaattaccctctgcat

SEQ ID NO: 6819 - DNA, 20 bp, Artificial Sequence
  Synthetic oligonucleotide
ctcaattaccctctgcatac

SEQ ID NO: 6820 - DNA, 14 bp, Artificial Sequence
  Synthetic oligonucleotide
ccgccgatgagaat

SEQ ID NO: 6821 - DNA, 13 bp, Artificial Sequence
  Synthetic oligonucleotide
cgccgatgagaat

SEQ ID NO: 6822 - DNA, 13 bp, Artificial Sequence
  Synthetic oligonucleotide
cccgccgatgaga

SEQ ID NO: 6823 - DNA, 20 bp, Artificial Sequence
  Synthetic oligonucleotide
tcagactaattctcatcggc

SEQ ID NO: 6824 - DNA, 19 bp, Artificial Sequence
  Synthetic oligonucleotide
agactaattctcatcggcg

SEQ ID NO: 6825 - DNA, 18 bp, Artificial Sequence
  Synthetic oligonucleotide
attctcatcggcgggcac

SEQ ID NO: 6826 - DNA, 18 bp, Artificial Sequence
  Synthetic oligonucleotide
attctcatcggcgggcac

SEQ ID NO: 6827 - DNA, 18 bp, Artificial Sequence
  Synthetic oligonucleotide
attctcatcggcgggcac

SEQ ID NO: 6828 - DNA, 18 bp, Artificial Sequence
  Synthetic oligonucleotide
attctcatcggcgggcac

SEQ ID NO: 6829 - DNA, 18 bp, Artificial Sequence
  Synthetic oligonucleotide
attctcatcggcgggcac

SEQ ID NO: 6830 - DNA, 18 bp, Artificial Sequence
  Synthetic oligonucleotide
attctcatcggcgggcac

SEQ ID NO: 6831 - DNA, 18 bp, Artificial Sequence
  Synthetic oligonucleotide
attctcatcggcgggcac

SEQ ID NO: 6832 - DNA, 18 bp, Artificial Sequence
  Synthetic oligonucleotide
attctcatcggcgggcac

SEQ ID NO: 6833 - DNA, 18 bp, Artificial Sequence
  Synthetic oligonucleotide
attctcatcggcgggcac

SEQ ID NO: 6834 - DNA, 18 bp, Artificial Sequence
  Synthetic oligonucleotide
attctcatcggcgggcac

SEQ ID NO: 6835 - DNA, 18 bp, Artificial Sequence
  Synthetic oligonucleotide
attctcatcggcgggcac

SEQ ID NO: 6836 - DNA, 18 bp, Artificial Sequence
  Synthetic oligonucleotide
attctcatcggcgggcac

SEQ ID NO: 6837 - DNA, 18 bp, Artificial Sequence
  Synthetic oligonucleotide
attctcatcggcgggcac

SEQ ID NO: 6838 - DNA, 18 bp, Artificial Sequence
  Synthetic oligonucleotide
attctcatcggcgggcac

SEQ ID NO: 6839 - DNA, 18 bp, Artificial Sequence
  Synthetic oligonucleotide
attctcatcggcgggcac

SEQ ID NO: 6840 - DNA, 18 bp, Artificial Sequence
  Synthetic oligonucleotide
attctcatcggcgggcac

SEQ ID NO: 6841 - DNA, 18 bp, Artificial Sequence
  Synthetic oligonucleotide
attctcatcggcgggcac

SEQ ID NO: 6842 - DNA, 18 bp, Artificial Sequence
  Synthetic oligonucleotide
attctcatcggcgggcac

SEQ ID NO: 6843 - DNA, 18 bp, Artificial Sequence
  Synthetic oligonucleotide
attctcatcggcgggcac

SEQ ID NO: 6844 - DNA, 18 bp, Artificial Sequence
  Synthetic oligonucleotide
attctcatcggcgggcac

SEQ ID NO: 6845 - DNA, 18 bp, Artificial Sequence
  Synthetic oligonucleotide
attctcatcggcgggcac

SEQ ID NO: 6846 - DNA, 18 bp, Artificial Sequence
  Synthetic oligonucleotide
attctcatcggcgggcac

SEQ ID NO: 6847 - DNA, 18 bp, Artificial Sequence
  Synthetic oligonucleotide
attctcatcggcgggcac

SEQ ID NO: 6848 - DNA, 18 bp, Artificial Sequence
  Synthetic oligonucleotide
attctcatcggcgggcac

SEQ ID NO: 6849 - DNA, 18 bp, Artificial Sequence
  Synthetic oligonucleotide
attctcatcggcgggcac

SEQ ID NO: 6850 - DNA, 18 bp, Artificial Sequence
  Synthetic oligonucleotide
attctcatcggcgggcac

SEQ ID NO: 6851 - DNA, 18 bp, Artificial Sequence
  Synthetic oligonucleotide
attctcatcggcgggcac

SEQ ID NO: 6852 - DNA, 18 bp, Artificial Sequence
  Synthetic oligonucleotide
attctcatcggcgggcac

SEQ ID NO: 6853 - DNA, 18 bp, Artificial Sequence
  Synthetic oligonucleotide
attctcatcggcgggcac

SEQ ID NO: 6854 - DNA, 18 bp, Artificial Sequence
  Synthetic oligonucleotide
attctcatcggcgggcac

SEQ ID NO: 6855 - DNA, 18 bp, Artificial Sequence
  Synthetic oligonucleotide
attctcatcggcgggcac

SEQ ID NO: 6856 - DNA, 18 bp, Artificial Sequence
  Synthetic oligonucleotide
attctcatcggcgggcac

SEQ ID NO: 6857 - DNA, 18 bp, Artificial Sequence
  Synthetic oligonucleotide
attctcatcggcgggcac

SEQ ID NO: 6858 - DNA, 18 bp, Artificial Sequence
  Synthetic oligonucleotide
attctcatcggcgggcac

SEQ ID NO: 6859 - DNA, 18 bp, Artificial Sequence
  Synthetic oligonucleotide
attctcatcggcgggcac

SEQ ID NO: 6860 - DNA, 18 bp, Artificial Sequence
  Synthetic oligonucleotide
attctcatcggcgggcac

SEQ ID NO: 6861 - DNA, 18 bp, Artificial Sequence
  Synthetic oligonucleotide
attctcatcggcgggcac

SEQ ID NO: 6862 - DNA, 18 bp, Artificial Sequence
  Synthetic oligonucleotide
attctcatcggcgggcac

SEQ ID NO: 6863 - DNA, 18 bp, Artificial Sequence
  Synthetic oligonucleotide
attctcatcggcgggcac

SEQ ID NO: 6864 - DNA, 18 bp, Artificial Sequence
  Synthetic oligonucleotide
attctcatcggcgggcac

SEQ ID NO: 6865 - DNA, 18 bp, Artificial Sequence
  Synthetic oligonucleotide
attctcatcggcgggcac

SEQ ID NO: 6866 - DNA, 18 bp, Artificial Sequence
  Synthetic oligonucleotide
attctcatcggcgggcac

SEQ ID NO: 6867 - DNA, 18 bp, Artificial Sequence
  Synthetic oligonucleotide
attctcatcggcgggcac

SEQ ID NO: 6868 - DNA, 18 bp, Artificial Sequence
  Synthetic oligonucleotide
attctcatcggcgggcac

SEQ ID NO: 6869 - DNA, 18 bp, Artificial Sequence
  Synthetic oligonucleotide
attctcatcggcgggcac

SEQ ID NO: 6870 - DNA, 18 bp, Artificial Sequence
  Synthetic oligonucleotide
attctcatcggcgggcac

SEQ ID NO: 6871 - DNA, 18 bp, Artificial Sequence
  Synthetic oligonucleotide
attctcatcggcgggcac

SEQ ID NO: 6872 - DNA, 18 bp, Artificial Sequence
  Synthetic oligonucleotide
attctcatcggcgggcac

SEQ ID NO: 6873 - DNA, 18 bp, Artificial Sequence
  Synthetic oligonucleotide
attctcatcggcgggcac

SEQ ID NO: 6874 - DNA, 18 bp, Artificial Sequence
  Synthetic oligonucleotide
attctcatcggcgggcac

SEQ ID NO: 6875 - DNA, 18 bp, Artificial Sequence
  Synthetic oligonucleotide
attctcatcggcgggcac

SEQ ID NO: 6876 - DNA, 18 bp, Artificial Sequence
  Synthetic oligonucleotide
attctcatcggcgggcac

SEQ ID NO: 6877 - DNA, 18 bp, Artificial Sequence
  Synthetic oligonucleotide
attctcatcggcgggcac

SEQ ID NO: 6878 - DNA, 18 bp, Artificial Sequence
  Synthetic oligonucleotide
attctcatcggcgggcac

SEQ ID NO: 6879 - DNA, 18 bp, Artificial Sequence
  Synthetic oligonucleotide
attctcatcggcgggcac

SEQ ID NO: 6880 - DNA, 18 bp, Artificial Sequence
  Synthetic oligonucleotide
attctcatcggcgggcac

SEQ ID NO: 6881 - DNA, 18 bp, Artificial Sequence
  Synthetic oligonucleotide
attctcatcggcgggcac

SEQ ID NO: 6882 - DNA, 18 bp, Artificial Sequence
  Synthetic oligonucleotide
attctcatcggcgggcac

SEQ ID NO: 6883 - DNA, 18 bp, Artificial Sequence
  Synthetic oligonucleotide
attctcatcggcgggcac

SEQ ID NO: 6884 - DNA, 18 bp, Artificial Sequence
  Synthetic oligonucleotide
attctcatcggcgggcac

SEQ ID NO: 6885 - DNA, 18 bp, Artificial Sequence
  Synthetic oligonucleotide
attctcatcggcgggcac

SEQ ID NO: 6886 - DNA, 18 bp, Artificial Sequence
  Synthetic oligonucleotide
attctcatcggcgggcac

SEQ ID NO: 6887 - DNA, 18 bp, Artificial Sequence
  Synthetic oligonucleotide
attctcatcggcgggcac

SEQ ID NO: 6888 - DNA, 18 bp, Artificial Sequence
  Synthetic oligonucleotide
attctcatcggcgggcac

SEQ ID NO: 6889 - DNA, 18 bp, Artificial Sequence
  Synthetic oligonucleotide
attctcatcggcgggcac

SEQ ID NO: 6890 - DNA, 18 bp, Artificial Sequence
  Synthetic oligonucleotide
attctcatcggcgggcac

SEQ ID NO: 6891 - DNA, 18 bp, Artificial Sequence
  Synthetic oligonucleotide
attctcatcggcgggcac

SEQ ID NO: 6892 - DNA, 18 bp, Artificial Sequence
  Synthetic oligonucleotide
attctcatcggcgggcac

SEQ ID NO: 6893 - DNA, 18 bp, Artificial Sequence
  Synthetic oligonucleotide
attctcatcggcgggcac

SEQ ID NO: 6894 - DNA, 18 bp, Artificial Sequence
  Synthetic oligonucleotide
attctcatcggcgggcac

SEQ ID NO: 6895 - DNA, 18 bp, Artificial Sequence
  Synthetic oligonucleotide
attctcatcggcgggcac

SEQ ID NO: 6896 - DNA, 18 bp, Artificial Sequence
  Synthetic oligonucleotide
attctcatcggcgggcac

SEQ ID NO: 6897 - DNA, 18 bp, Artificial Sequence
  Synthetic oligonucleotide
attctcatcggcgggcac

SEQ ID NO: 6898 - DNA, 18 bp, Artificial Sequence
  Synthetic oligonucleotide
attctcatcggcgggcac

SEQ ID NO: 6899 - DNA, 18 bp, Artificial Sequence
  Synthetic oligonucleotide
attctcatcggcgggcac

SEQ ID NO: 6900 - DNA, 18 bp, Artificial Sequence
  Synthetic oligonucleotide
attctcatcggcgggcac

SEQ ID NO: 6901 - DNA, 18 bp, Artificial Sequence
  Synthetic oligonucleotide
attctcatcggcgggcac

SEQ ID NO: 6902 - DNA, 18 bp, Artificial Sequence
  Synthetic oligonucleotide
attctcatcggcgggcac

SEQ ID NO: 6903 - DNA, 18 bp, Artificial Sequence
  Synthetic oligonucleotide
attctcatcggcgggcac

SEQ ID NO: 6904 - DNA, 18 bp, Artificial Sequence
  Synthetic oligonucleotide
attctcatcggcgggcac

SEQ ID NO: 6905 - DNA, 18 bp, Artificial Sequence
  Synthetic oligonucleotide
attctcatcggcgggcac

SEQ ID NO: 6906 - DNA, 18 bp, Artificial Sequence
  Synthetic oligonucleotide
attctcatcggcgggcac

SEQ ID NO: 6907 - DNA, 18 bp, Artificial Sequence
  Synthetic oligonucleotide
attctcatcggcgggcac

SEQ ID NO: 6908 - DNA, 18 bp, Artificial Sequence
  Synthetic oligonucleotide
attctcatcggcgggcac

SEQ ID NO: 6909 - DNA, 18 bp, Artificial Sequence
  Synthetic oligonucleotide
attctcatcggcgggcac

SEQ ID NO: 6910 - DNA, 18 bp, Artificial Sequence
  Synthetic oligonucleotide
attctcatcggcgggcac

SEQ ID NO: 6911 - DNA, 18 bp, Artificial Sequence
  Synthetic oligonucleotide
attctcatcggcgggcac

SEQ ID NO: 6912 - DNA, 18 bp, Artificial Sequence
  Synthetic oligonucleotide
attctcatcggcgggcac

SEQ ID NO: 6913 - DNA, 18 bp, Artificial Sequence
  Synthetic oligonucleotide
attctcatcggcgggcac

SEQ ID NO: 6914 - DNA, 18 bp, Artificial Sequence
  Synthetic oligonucleotide
attctcatcggcgggcac

SEQ ID NO: 6915 - DNA, 18 bp, Artificial Sequence
  Synthetic oligonucleotide
attctcatcggcgggcac

SEQ ID NO: 6916 - DNA, 18 bp, Artificial Sequence
  Synthetic oligonucleotide
attctcatcggcgggcac

SEQ ID NO: 6917 - DNA, 18 bp, Artificial Sequence
  Synthetic oligonucleotide
attctcatcggcgggcac

SEQ ID NO: 6918 - DNA, 18 bp, Artificial Sequence
  Synthetic oligonucleotide
attctcatcggcgggcac

SEQ ID NO: 6919 - DNA, 18 bp, Artificial Sequence
  Synthetic oligonucleotide
attctcatcggcgggcac

SEQ ID NO: 6920 - DNA, 18 bp, Artificial Sequence
  Synthetic oligonucleotide
attctcatcggcgggcac

SEQ ID NO: 6921 - DNA, 18 bp, Artificial Sequence
  Synthetic oligonucleotide
attctcatcggcgggcac

SEQ ID NO: 6922 - DNA, 18 bp, Artificial Sequence
  Synthetic oligonucleotide
attctcatcggcgggcac

SEQ ID NO: 6923 - DNA, 18 bp, Artificial Sequence
  Synthetic oligonucleotide
attctcatcggcgggcac

SEQ ID NO: 6924 - DNA, 18 bp, Artificial Sequence
  Synthetic oligonucleotide
attctcatcggcgggcac

SEQ ID NO: 6925 - DNA, 18 bp, Artificial Sequence
  Synthetic oligonucleotide
attctcatcggcgggcac

SEQ ID NO: 6926 - DNA, 18 bp, Artificial Sequence
  Synthetic oligonucleotide
attctcatcggcgggcac

SEQ ID NO: 6927 - DNA, 18 bp, Artificial Sequence
  Synthetic oligonucleotide
attctcatcggcgggcac

SEQ ID NO: 6928 - DNA, 18 bp, Artificial Sequence
  Synthetic oligonucleotide
attctcatcggcgggcac

SEQ ID NO: 6929 - DNA, 18 bp, Artificial Sequence
  Synthetic oligonucleotide
attctcatcggcgggcac

SEQ ID NO: 6930 - DNA, 18 bp, Artificial Sequence
  Synthetic oligonucleotide
attctcatcggcgggcac

SEQ ID NO: 6931 - DNA, 18 bp, Artificial Sequence
  Synthetic oligonucleotide
attctcatcggcgggcac

SEQ ID NO: 6932 - DNA, 18 bp, Artificial Sequence
  Synthetic oligonucleotide
attctcatcggcgggcac

SEQ ID NO: 6933 - DNA, 18 bp, Artificial Sequence
  Synthetic oligonucleotide
attctcatcggcgggcac

SEQ ID NO: 6934 - DNA, 18 bp, Artificial Sequence
  Synthetic oligonucleotide
attctcatcggcgggcac

SEQ ID NO: 6935 - DNA, 18 bp, Artificial Sequence
  Synthetic oligonucleotide
attctcatcggcgggcac

SEQ ID NO: 6936 - DNA, 18 bp, Artificial Sequence
  Synthetic oligonucleotide
attctcatcggcgggcac

SEQ ID NO: 6937 - DNA, 18 bp, Artificial Sequence
  Synthetic oligonucleotide
attctcatcggcgggcac

SEQ ID NO: 6938 - DNA, 18 bp, Artificial Sequence
  Synthetic oligonucleotide
attctcatcggcgggcac

SEQ ID NO: 6939 - DNA, 18 bp, Artificial Sequence
  Synthetic oligonucleotide
attctcatcggcgggcac

SEQ ID NO: 6940 - DNA, 18 bp, Artificial Sequence
  Synthetic oligonucleotide
attctcatcggcgggcac

SEQ ID NO: 6941 - DNA, 18 bp, Artificial Sequence
  Synthetic oligonucleotide
attctcatcggcgggcac

SEQ ID NO: 6942 - DNA, 18 bp, Artificial Sequence
  Synthetic oligonucleotide
attctcatcggcgggcac

SEQ ID NO: 6943 - DNA, 18 bp, Artificial Sequence
  Synthetic oligonucleotide
attctcatcggcgggcac

SEQ ID NO: 6944 - DNA, 18 bp, Artificial Sequence
  Synthetic oligonucleotide
attctcatcggcgggcac

SEQ ID NO: 6945 - DNA, 18 bp, Artificial Sequence
  Synthetic oligonucleotide
attctcatcggcgggcac

SEQ ID NO: 6946 - DNA, 18 bp, Artificial Sequence
  Synthetic oligonucleotide
attctcatcggcgggcac

SEQ ID NO: 6947 - DNA, 18 bp, Artificial Sequence
  Synthetic oligonucleotide
attctcatcggcgggcac

SEQ ID NO: 6948 - DNA, 18 bp, Artificial Sequence
  Synthetic oligonucleotide
attctcatcggcgggcac

SEQ ID NO: 6949 - DNA, 18 bp, Artificial Sequence
  Synthetic oligonucleotide
attctcatcggcgggcac

SEQ ID NO: 6950 - DNA, 18 bp, Artificial Sequence
  Synthetic oligonucleotide
attctcatcggcgggcac

SEQ ID NO: 6951 - DNA, 18 bp, Artificial Sequence
  Synthetic oligonucleotide
attctcatcggcgggcac

SEQ ID NO: 6952 - DNA, 18 bp, Artificial Sequence
  Synthetic oligonucleotide
attctcatcggcgggcac

SEQ ID NO: 6953 - DNA, 18 bp, Artificial Sequence
  Synthetic oligonucleotide
attctcatcggcgggcac

SEQ ID NO: 6954 - DNA, 18 bp, Artificial Sequence
  Synthetic oligonucleotide
attctcatcggcgggcac

SEQ ID NO: 6955 - DNA, 18 bp, Artificial Sequence
  Synthetic oligonucleotide
attctcatcggcgggcac

SEQ ID NO: 6956 - DNA, 18 bp, Artificial Sequence
  Synthetic oligonucleotide
attctcatcggcgggcac

SEQ ID NO: 6957 - DNA, 18 bp, Artificial Sequence
  Synthetic oligonucleotide
attctcatcggcgggcac

SEQ ID NO: 6958 - DNA, 18 bp, Artificial Sequence
  Synthetic oligonucleotide
attctcatcggcgggcac

SEQ ID NO: 6959 - DNA, 18 bp, Artificial Sequence
  Synthetic oligonucleotide
attctcatcggcgggcac

SEQ ID NO: 6960 - DNA, 18 bp, Artificial Sequence
  Synthetic oligonucleotide
attctcatcggcgggcac

SEQ ID NO: 6961 - DNA, 18 bp, Artificial Sequence
  Synthetic oligonucleotide
attctcatcggcgggcac

SEQ ID NO: 6962 - DNA, 18 bp, Artificial Sequence
  Synthetic oligonucleotide
attctcatcggcgggcac

SEQ ID NO: 6963 - DNA, 18 bp, Artificial Sequence
  Synthetic oligonucleotide
attctcatcggcgggcac

SEQ ID NO: 6964 - DNA, 18 bp, Artificial Sequence
  Synthetic oligonucleotide
attctcatcggcgggcac

SEQ ID NO: 6965 - DNA, 18 bp, Artificial Sequence
  Synthetic oligonucleotide
attctcatcggcgggcac

SEQ ID NO: 6966 - DNA, 18 bp, Artificial Sequence
  Synthetic oligonucleotide
attctcatcggcgggcac

SEQ ID NO: 6967 - DNA, 18 bp, Artificial Sequence
  Synthetic oligonucleotide
attctcatcggcgggcac

SEQ ID NO: 6968 - DNA, 14 bp, Artificial Sequence
  Synthetic oligonucleotide
ccgccgacgagaat

SEQ ID NO: 6969 - DNA, 13 bp, Artificial Sequence
  Synthetic oligonucleotide
tgcacatgaaaag

SEQ ID NO: 6970 - DNA, 13 bp, Artificial Sequence
  Synthetic oligonucleotide
tgcacatgaaaag

SEQ ID NO: 6971 - DNA, 13 bp, Artificial Sequence
  Synthetic oligonucleotide
tgcacatgaaaag

SEQ ID NO: 6972 - DNA, 18 bp, Artificial Sequence
  Synthetic oligonucleotide
ctttcctttacgatcata

SEQ ID NO: 6973 - DNA, 18 bp, Artificial Sequence
  Synthetic oligonucleotide
ctttcctttacgatcata

SEQ ID NO: 6974 - DNA, 20 bp, Artificial Sequence
  Synthetic oligonucleotide
tactttcctttacgatcata

SEQ ID NO: 6975 - DNA, 20 bp, Artificial Sequence
  Synthetic oligonucleotide
tactttcctttacgatcata

SEQ ID NO: 6976 - DNA, 17 bp, Artificial Sequence
  Synthetic oligonucleotide
tatggtttccgacccac

SEQ ID NO: 6977 - DNA, 15 bp, Artificial Sequence
  Synthetic oligonucleotide
acctgtttagattgt

SEQ ID NO: 6978 - DNA, 13 bp, Artificial Sequence
  Synthetic oligonucleotide
ccggtaacacacc

SEQ ID NO: 6979 - DNA, 15 bp, Artificial Sequence
  Synthetic oligonucleotide
ccggtaacacacctt

SEQ ID NO: 6980 - DNA, 17 bp, Artificial Sequence
  Synthetic oligonucleotide
attcaactcgggacttg

SEQ ID NO: 6981 - DNA, 19 bp, Artificial Sequence
  Synthetic oligonucleotide
tgttctttatcatgatgtt

SEQ ID NO: 6982 - DNA, 16 bp, Artificial Sequence
  Synthetic oligonucleotide
tcagactcacactaat

SEQ ID NO: 6983 - DNA, 17 bp, Artificial Sequence
  Synthetic oligonucleotide
tcagactcacactaatt

SEQ ID NO: 6984 - DNA, 17 bp, Artificial Sequence
  Synthetic oligonucleotide
tcagactcatactaatt

SEQ ID NO: 6985 - DNA, 18 bp, Artificial Sequence
  Synthetic oligonucleotide
tcagactcatactaattc

SEQ ID NO: 6986 - DNA, 16 bp, Artificial Sequence
  Synthetic oligonucleotide
atcagactccgactaa

SEQ ID NO: 6987 - DNA, 17 bp, Artificial Sequence
  Synthetic oligonucleotide
atcagactccgactaat

SEQ ID NO: 6988 - DNA, 15 bp, Artificial Sequence
  Synthetic oligonucleotide
tgtgcattatggttg

SEQ ID NO: 6989 - DNA, 18 bp, Artificial Sequence
  Synthetic oligonucleotide
agcttgtgcattatggtt

SEQ ID NO: 6990 - DNA, 16 bp, Artificial Sequence
  Synthetic oligonucleotide
aatcttagtgaatttg

SEQ ID NO: 6991 - DNA, 16 bp, Artificial Sequence
  Synthetic oligonucleotide
aatcttagtgaatttg

SEQ ID NO: 6992 - DNA, 21 bp, Artificial Sequence
  Synthetic oligonucleotide
cttgctttacatataagttat

SEQ ID NO: 6993 - DNA, 18 bp, Artificial Sequence
  Synthetic oligonucleotide
ttgctttacatataagtt

SEQ ID NO: 6994 - DNA, 18 bp, Artificial Sequence
  Synthetic oligonucleotide
ttgctttacatataagtt

SEQ ID NO: 6995 - DNA, 18 bp, Artificial Sequence
  Synthetic oligonucleotide
ttgctttacatataagtt

SEQ ID NO: 6996 - DNA, 18 bp, Artificial Sequence
  Synthetic oligonucleotide
ttgctttacatataagtt

SEQ ID NO: 6997 - DNA, 18 bp, Artificial Sequence
  Synthetic oligonucleotide
ttgctttacatataagtt

SEQ ID NO: 6998 - DNA, 18 bp, Artificial Sequence
  Synthetic oligonucleotide
ttgctttacatataagtt

SEQ ID NO: 6999 - DNA, 18 bp, Artificial Sequence
  Synthetic oligonucleotide
ttgctttacatataagtt

SEQ ID NO: 7000 - DNA, 18 bp, Artificial Sequence
  Synthetic oligonucleotide
ttgctttacatataagtt

SEQ ID NO: 7001 - DNA, 18 bp, Artificial Sequence
  Synthetic oligonucleotide
ttgctttacatataagtt

SEQ ID NO: 7002 - DNA, 18 bp, Artificial Sequence
  Synthetic oligonucleotide
ttgctttacatataagtt

SEQ ID NO: 7003 - DNA, 18 bp, Artificial Sequence
  Synthetic oligonucleotide
ttgctttacatataagtt

SEQ ID NO: 7004 - DNA, 18 bp, Artificial Sequence
  Synthetic oligonucleotide
ttgctttacatataagtt

SEQ ID NO: 7005 - DNA, 18 bp, Artificial Sequence
  Synthetic oligonucleotide
ttgctttacatataagtt

SEQ ID NO: 7006 - DNA, 18 bp, Artificial Sequence
  Synthetic oligonucleotide
ttgctttacatataagtt

SEQ ID NO: 7007 - DNA, 18 bp, Artificial Sequence
  Synthetic oligonucleotide
ttgctttacatataagtt

SEQ ID NO: 7008 - DNA, 18 bp, Artificial Sequence
  Synthetic oligonucleotide
ttgctttacatataagtt

SEQ ID NO: 7009 - DNA, 18 bp, Artificial Sequence
  Synthetic oligonucleotide
ttgctttacatataagtt

SEQ ID NO: 7010 - DNA, 18 bp, Artificial Sequence
  Synthetic oligonucleotide
ttgctttacatataagtt

SEQ ID NO: 7011 - DNA, 18 bp, Artificial Sequence
  Synthetic oligonucleotide
ttgctttacatataagtt

SEQ ID NO: 7012 - DNA, 18 bp, Artificial Sequence
  Synthetic oligonucleotide
ttgctttacatataagtt

SEQ ID NO: 7013 - DNA, 18 bp, Artificial Sequence
  Synthetic oligonucleotide
ttgctttacatataagtt

SEQ ID NO: 7014 - DNA, 18 bp, Artificial Sequence
  Synthetic oligonucleotide
ttgctttacatataagtt

SEQ ID NO: 7015 - DNA, 18 bp, Artificial Sequence
  Synthetic oligonucleotide
ttgctttacatataagtt

SEQ ID NO: 7016 - DNA, 18 bp, Artificial Sequence
  Synthetic oligonucleotide
ttgctttacatataagtt

SEQ ID NO: 7017 - DNA, 18 bp, Artificial Sequence
  Synthetic oligonucleotide
ttgctttacatataagtt

SEQ ID NO: 7018 - DNA, 18 bp, Artificial Sequence
  Synthetic oligonucleotide
ttgctttacatataagtt

SEQ ID NO: 7019 - DNA, 18 bp, Artificial Sequence
  Synthetic oligonucleotide
ttgctttacatataagtt

SEQ ID NO: 7020 - DNA, 18 bp, Artificial Sequence
  Synthetic oligonucleotide
ttgctttacatataagtt

SEQ ID NO: 7021 - DNA, 18 bp, Artificial Sequence
  Synthetic oligonucleotide
ttgctttacatataagtt

SEQ ID NO: 7022 - DNA, 18 bp, Artificial Sequence
  Synthetic oligonucleotide
ttgctttacatataagtt

SEQ ID NO: 7023 - DNA, 18 bp, Artificial Sequence
  Synthetic oligonucleotide
ttgctttacatataagtt

SEQ ID NO: 7024 - DNA, 18 bp, Artificial Sequence
  Synthetic oligonucleotide
ttgctttacatataagtt

SEQ ID NO: 7025 - DNA, 18 bp, Artificial Sequence
  Synthetic oligonucleotide
ttgctttacatataagtt

SEQ ID NO: 7026 - DNA, 18 bp, Artificial Sequence
  Synthetic oligonucleotide
ttgctttacatataagtt

SEQ ID NO: 7027 - DNA, 18 bp, Artificial Sequence
  Synthetic oligonucleotide
ttgctttacatataagtt

SEQ ID NO: 7028 - DNA, 18 bp, Artificial Sequence
  Synthetic oligonucleotide
ttgctttacatataagtt

SEQ ID NO: 7029 - DNA, 18 bp, Artificial Sequence
  Synthetic oligonucleotide
ttgctttacatataagtt

SEQ ID NO: 7030 - DNA, 18 bp, Artificial Sequence
  Synthetic oligonucleotide
ttgctttacatataagtt

SEQ ID NO: 7031 - DNA, 18 bp, Artificial Sequence
  Synthetic oligonucleotide
ttgctttacatataagtt

SEQ ID NO: 7032 - DNA, 18 bp, Artificial Sequence
  Synthetic oligonucleotide
ttgctttacatataagtt

SEQ ID NO: 7033 - DNA, 18 bp, Artificial Sequence
  Synthetic oligonucleotide
ttgctttacatataagtt

SEQ ID NO: 7034 - DNA, 18 bp, Artificial Sequence
  Synthetic oligonucleotide
ttgctttacatataagtt

SEQ ID NO: 7035 - DNA, 18 bp, Artificial Sequence
  Synthetic oligonucleotide
ttgctttacatataagtt

SEQ ID NO: 7036 - DNA, 18 bp, Artificial Sequence
  Synthetic oligonucleotide
ttgctttacatataagtt

SEQ ID NO: 7037 - DNA, 18 bp, Artificial Sequence
  Synthetic oligonucleotide
ttgctttacatataagtt

SEQ ID NO: 7038 - DNA, 18 bp, Artificial Sequence
  Synthetic oligonucleotide
ttgctttacatataagtt

SEQ ID NO: 7039 - DNA, 18 bp, Artificial Sequence
  Synthetic oligonucleotide
ttgctttacatataagtt

SEQ ID NO: 7040 - DNA, 18 bp, Artificial Sequence
  Synthetic oligonucleotide
ttgctttacatataagtt

SEQ ID NO: 7041 - DNA, 18 bp, Artificial Sequence
  Synthetic oligonucleotide
ttgctttacatataagtt

SEQ ID NO: 7042 - DNA, 18 bp, Artificial Sequence
  Synthetic oligonucleotide
ttgctttacatataagtt

SEQ ID NO: 7043 - DNA, 18 bp, Artificial Sequence
  Synthetic oligonucleotide
ttgctttacatataagtt

SEQ ID NO: 7044 - DNA, 18 bp, Artificial Sequence
  Synthetic oligonucleotide
ttgctttacatataagtt

SEQ ID NO: 7045 - DNA, 18 bp, Artificial Sequence
  Synthetic oligonucleotide
ttgctttacatataagtt

SEQ ID NO: 7046 - DNA, 18 bp, Artificial Sequence
  Synthetic oligonucleotide
ttgctttacatataagtt

SEQ ID NO: 7047 - DNA, 18 bp, Artificial Sequence
  Synthetic oligonucleotide
ttgctttacatataagtt

SEQ ID NO: 7048 - DNA, 18 bp, Artificial Sequence
  Synthetic oligonucleotide
ttgctttacatataagtt

SEQ ID NO: 7049 - DNA, 18 bp, Artificial Sequence
  Synthetic oligonucleotide
ttgctttacatataagtt

SEQ ID NO: 7050 - DNA, 13 bp, Artificial Sequence
  Synthetic oligonucleotide
caccaaatttgca

SEQ ID NO: 7051 - DNA, 13 bp, Artificial Sequence
  Synthetic oligonucleotide
caccaaatttgca

SEQ ID NO: 7052 - DNA, 18 bp, Artificial Sequence
  Synthetic oligonucleotide
acacactgaatagagact

SEQ ID NO: 7053 - DNA, 15 bp, Artificial Sequence
  Synthetic oligonucleotide
aatctcgcaccattt

SEQ ID NO: 7054 - DNA, 15 bp, Artificial Sequence
  Synthetic oligonucleotide
ccggtaacacacctt

SEQ ID NO: 7055 - DNA, 13 bp, Artificial Sequence
  Synthetic oligonucleotide
ccggtaacacacc

SEQ ID NO: 7056 - DNA, 16 bp, Artificial Sequence
  Synthetic oligonucleotide
ttatcagggtgttaac

SEQ ID NO: 7057 - DNA, 19 bp, Artificial Sequence
  Synthetic oligonucleotide
tctttatcagggtgttaac

SEQ ID NO: 7058 - DNA, 17 bp, Artificial Sequence
  Synthetic oligonucleotide
atctataccggtaatta

SEQ ID NO: 7059 - DNA, 20 bp, Artificial Sequence
  Synthetic oligonucleotide
aacaatctataccggtaatt

SEQ ID NO: 7060 - DNA, 15 bp, Artificial Sequence
  Synthetic oligonucleotide
ccggtaacacacctt

SEQ ID NO: 7061 - DNA, 13 bp, Artificial Sequence
  Synthetic oligonucleotide
ccggtaacacacc

SEQ ID NO: 7062 - DNA, 16 bp, Artificial Sequence
  Synthetic oligonucleotide
cctttacaaccatatg

SEQ ID NO: 7063 - DNA, 15 bp, Artificial Sequence
  Synthetic oligonucleotide
aagacgtgcaaggat

SEQ ID NO: 7064 - DNA, 16 bp, Artificial Sequence
  Synthetic oligonucleotide
tccttgcacgtcttga

SEQ ID NO: 7065 - DNA, 16 bp, Artificial Sequence
  Synthetic oligonucleotide
tccttgcacgtcttga

SEQ ID NO: 7066 - DNA, 16 bp, Artificial Sequence
  Synthetic oligonucleotide
tccttgcacgtcttga

SEQ ID NO: 7067 - DNA, 16 bp, Artificial Sequence
  Synthetic oligonucleotide
tccttgcacgtcttga

SEQ ID NO: 7068 - DNA, 16 bp, Artificial Sequence
  Synthetic oligonucleotide
tccttgcacgtcttga

SEQ ID NO: 7069 - DNA, 16 bp, Artificial Sequence
  Synthetic oligonucleotide
tccttgcacgtcttga

SEQ ID NO: 7070 - DNA, 16 bp, Artificial Sequence
  Synthetic oligonucleotide
tccttgcacgtcttga

SEQ ID NO: 7071 - DNA, 16 bp, Artificial Sequence
  Synthetic oligonucleotide
tccttgcacgtcttga

SEQ ID NO: 7072 - DNA, 16 bp, Artificial Sequence
  Synthetic oligonucleotide
tccttgcacgtcttga

SEQ ID NO: 7073 - DNA, 16 bp, Artificial Sequence
  Synthetic oligonucleotide
tccttgcacgtcttga

SEQ ID NO: 7074 - DNA, 16 bp, Artificial Sequence
  Synthetic oligonucleotide
tccttgcacgtcttga

SEQ ID NO: 7075 - DNA, 16 bp, Artificial Sequence
  Synthetic oligonucleotide
tccttgcacgtcttga

SEQ ID NO: 7076 - DNA, 16 bp, Artificial Sequence
  Synthetic oligonucleotide
tccttgcacgtcttga

SEQ ID NO: 7077 - DNA, 16 bp, Artificial Sequence
  Synthetic oligonucleotide
tccttgcacgtcttga

SEQ ID NO: 7078 - DNA, 16 bp, Artificial Sequence
  Synthetic oligonucleotide
tccttgcacgtcttga

SEQ ID NO: 7079 - DNA, 16 bp, Artificial Sequence
  Synthetic oligonucleotide
tccttgcacgtcttga

SEQ ID NO: 7080 - DNA, 16 bp, Artificial Sequence
  Synthetic oligonucleotide
tccttgcacgtcttga

SEQ ID NO: 7081 - DNA, 16 bp, Artificial Sequence
  Synthetic oligonucleotide
tccttgcacgtcttga

SEQ ID NO: 7082 - DNA, 16 bp, Artificial Sequence
  Synthetic oligonucleotide
tccttgcacgtcttga

SEQ ID NO: 7083 - DNA, 16 bp, Artificial Sequence
  Synthetic oligonucleotide
tccttgcacgtcttga

SEQ ID NO: 7084 - DNA, 16 bp, Artificial Sequence
  Synthetic oligonucleotide
tccttgcacgtcttga

SEQ ID NO: 7085 - DNA, 16 bp, Artificial Sequence
  Synthetic oligonucleotide
tccttgcacgtcttga

SEQ ID NO: 7086 - DNA, 16 bp, Artificial Sequence
  Synthetic oligonucleotide
tccttgcacgtcttga

SEQ ID NO: 7087 - DNA, 16 bp, Artificial Sequence
  Synthetic oligonucleotide
tccttgcacgtcttga

SEQ ID NO: 7088 - DNA, 16 bp, Artificial Sequence
  Synthetic oligonucleotide
tccttgcacgtcttga

SEQ ID NO: 7089 - DNA, 16 bp, Artificial Sequence
  Synthetic oligonucleotide
tccttgcacgtcttga

SEQ ID NO: 7090 - DNA, 16 bp, Artificial Sequence
  Synthetic oligonucleotide
tccttgcacgtcttga

SEQ ID NO: 7091 - DNA, 16 bp, Artificial Sequence
  Synthetic oligonucleotide
tccttgcacgtcttga

SEQ ID NO: 7092 - DNA, 16 bp, Artificial Sequence
  Synthetic oligonucleotide
tccttgcacgtcttga

SEQ ID NO: 7093 - DNA, 16 bp, Artificial Sequence
  Synthetic oligonucleotide
tccttgcacgtcttga

SEQ ID NO: 7094 - DNA, 16 bp, Artificial Sequence
  Synthetic oligonucleotide
tccttgcacgtcttga

SEQ ID NO: 7095 - DNA, 16 bp, Artificial Sequence
  Synthetic oligonucleotide
tccttgcacgtcttga

SEQ ID NO: 7096 - DNA, 16 bp, Artificial Sequence
  Synthetic oligonucleotide
tccttgcacgtcttga

SEQ ID NO: 7097 - DNA, 16 bp, Artificial Sequence
  Synthetic oligonucleotide
tccttgcacgtcttga

SEQ ID NO: 7098 - DNA, 16 bp, Artificial Sequence
  Synthetic oligonucleotide
tccttgcacgtcttga

SEQ ID NO: 7099 - DNA, 16 bp, Artificial Sequence
  Synthetic oligonucleotide
tccttgcacgtcttga

SEQ ID NO: 7100 - DNA, 16 bp, Artificial Sequence
  Synthetic oligonucleotide
tccttgcacgtcttga

SEQ ID NO: 7101 - DNA, 16 bp, Artificial Sequence
  Synthetic oligonucleotide
tccttgcacgtcttga

SEQ ID NO: 7102 - DNA, 16 bp, Artificial Sequence
  Synthetic oligonucleotide
tccttgcacgtcttga

SEQ ID NO: 7103 - DNA, 16 bp, Artificial Sequence
  Synthetic oligonucleotide
tccttgcacgtcttga

SEQ ID NO: 7104 - DNA, 16 bp, Artificial Sequence
  Synthetic oligonucleotide
tccttgcacgtcttga

SEQ ID NO: 7105 - DNA, 16 bp, Artificial Sequence
  Synthetic oligonucleotide
tccttgcacgtcttga

SEQ ID NO: 7106 - DNA, 16 bp, Artificial Sequence
  Synthetic oligonucleotide
tccttgcacgtcttga

SEQ ID NO: 7107 - DNA, 16 bp, Artificial Sequence
  Synthetic oligonucleotide
tccttgcacgtcttga

SEQ ID NO: 7108 - DNA, 16 bp, Artificial Sequence
  Synthetic oligonucleotide
tccttgcacgtcttga

SEQ ID NO: 7109 - DNA, 16 bp, Artificial Sequence
  Synthetic oligonucleotide
tccttgcacgtcttga

SEQ ID NO: 7110 - DNA, 16 bp, Artificial Sequence
  Synthetic oligonucleotide
tccttgcacgtcttga

SEQ ID NO: 7111 - DNA, 16 bp, Artificial Sequence
  Synthetic oligonucleotide
tccttgcacgtcttga

SEQ ID NO: 7112 - DNA, 16 bp, Artificial Sequence
  Synthetic oligonucleotide
tccttgcacgtcttga

SEQ ID NO: 7113 - DNA, 16 bp, Artificial Sequence
  Synthetic oligonucleotide
tccttgcacgtcttga

SEQ ID NO: 7114 - DNA, 16 bp, Artificial Sequence
  Synthetic oligonucleotide
tccttgcacgtcttga

SEQ ID NO: 7115 - DNA, 16 bp, Artificial Sequence
  Synthetic oligonucleotide
tccttgcacgtcttga

SEQ ID NO: 7116 - DNA, 16 bp, Artificial Sequence
  Synthetic oligonucleotide
tccttgcacgtcttga

SEQ ID NO: 7117 - DNA, 16 bp, Artificial Sequence
  Synthetic oligonucleotide
tccttgcacgtcttga

SEQ ID NO: 7118 - DNA, 16 bp, Artificial Sequence
  Synthetic oligonucleotide
tccttgcacgtcttga

SEQ ID NO: 7119 - DNA, 16 bp, Artificial Sequence
  Synthetic oligonucleotide
tccttgcacgtcttga

SEQ ID NO: 7120 - DNA, 16 bp, Artificial Sequence
  Synthetic oligonucleotide
tccttgcacgtcttga

SEQ ID NO: 7121 - DNA, 16 bp, Artificial Sequence
  Synthetic oligonucleotide
tccttgcacgtcttga

SEQ ID NO: 7122 - DNA, 16 bp, Artificial Sequence
  Synthetic oligonucleotide
tccttgcacgtcttga

SEQ ID NO: 7123 - DNA, 16 bp, Artificial Sequence
  Synthetic oligonucleotide
tccttgcacgtcttga

SEQ ID NO: 7124 - DNA, 16 bp, Artificial Sequence
  Synthetic oligonucleotide
tccttgcacgtcttga

SEQ ID NO: 7125 - DNA, 16 bp, Artificial Sequence
  Synthetic oligonucleotide
tccttgcacgtcttga

SEQ ID NO: 7126 - DNA, 16 bp, Artificial Sequence
  Synthetic oligonucleotide
tccttgcacgtcttga

SEQ ID NO: 7127 - DNA, 16 bp, Artificial Sequence
  Synthetic oligonucleotide
tccttgcacgtcttga

SEQ ID NO: 7128 - DNA, 16 bp, Artificial Sequence
  Synthetic oligonucleotide
tccttgcacgtcttga

SEQ ID NO: 7129 - DNA, 16 bp, Artificial Sequence
  Synthetic oligonucleotide
tccttgcacgtcttga

SEQ ID NO: 7130 - DNA, 16 bp, Artificial Sequence
  Synthetic oligonucleotide
tccttgcacgtcttga

SEQ ID NO: 7131 - DNA, 16 bp, Artificial Sequence
  Synthetic oligonucleotide
tccttgcacgtcttga

SEQ ID NO: 7132 - DNA, 16 bp, Artificial Sequence
  Synthetic oligonucleotide
tccttgcacgtcttga

SEQ ID NO: 7133 - DNA, 16 bp, Artificial Sequence
  Synthetic oligonucleotide
tccttgcacgtcttga

SEQ ID NO: 7134 - DNA, 16 bp, Artificial Sequence
  Synthetic oligonucleotide
tccttgcacgtcttga

SEQ ID NO: 7135 - DNA, 16 bp, Artificial Sequence
  Synthetic oligonucleotide
tccttgcacgtcttga

SEQ ID NO: 7136 - DNA, 16 bp, Artificial Sequence
  Synthetic oligonucleotide
tccttgcacgtcttga

SEQ ID NO: 7137 - DNA, 16 bp, Artificial Sequence
  Synthetic oligonucleotide
tccttgcacgtcttga

SEQ ID NO: 7138 - DNA, 16 bp, Artificial Sequence
  Synthetic oligonucleotide
tccttgcacgtcttga

SEQ ID NO: 7139 - DNA, 16 bp, Artificial Sequence
  Synthetic oligonucleotide
tccttgcacgtcttga

SEQ ID NO: 7140 - DNA, 16 bp, Artificial Sequence
  Synthetic oligonucleotide
tccttgcacgtcttga

SEQ ID NO: 7141 - DNA, 16 bp, Artificial Sequence
  Synthetic oligonucleotide
tccttgcacgtcttga

SEQ ID NO: 7142 - DNA, 16 bp, Artificial Sequence
  Synthetic oligonucleotide
tccttgcacgtcttga

SEQ ID NO: 7143 - DNA, 16 bp, Artificial Sequence
  Synthetic oligonucleotide
tccttgcacgtcttga

SEQ ID NO: 7144 - DNA, 16 bp, Artificial Sequence
  Synthetic oligonucleotide
tccttgcacgtcttga

SEQ ID NO: 7145 - DNA, 16 bp, Artificial Sequence
  Synthetic oligonucleotide
tccttgcacgtcttga

SEQ ID NO: 7146 - DNA, 16 bp, Artificial Sequence
  Synthetic oligonucleotide
tccttgcacgtcttga

SEQ ID NO: 7147 - DNA, 16 bp, Artificial Sequence
  Synthetic oligonucleotide
tccttgcacgtcttga

SEQ ID NO: 7148 - DNA, 16 bp, Artificial Sequence
  Synthetic oligonucleotide
tccttgcacgtcttga

SEQ ID NO: 7149 - DNA, 16 bp, Artificial Sequence
  Synthetic oligonucleotide
tccttgcacgtcttga

SEQ ID NO: 7150 - DNA, 16 bp, Artificial Sequence
  Synthetic oligonucleotide
tccttgcacgtcttga

SEQ ID NO: 7151 - DNA, 16 bp, Artificial Sequence
  Synthetic oligonucleotide
tccttgcacgtcttga

SEQ ID NO: 7152 - DNA, 16 bp, Artificial Sequence
  Synthetic oligonucleotide
tccttgcacgtcttga

SEQ ID NO: 7153 - DNA, 16 bp, Artificial Sequence
  Synthetic oligonucleotide
tccttgcacgtcttga

SEQ ID NO: 7154 - DNA, 16 bp, Artificial Sequence
  Synthetic oligonucleotide
tccttgcacgtcttga

SEQ ID NO: 7155 - DNA, 16 bp, Artificial Sequence
  Synthetic oligonucleotide
tccttgcacgtcttga

SEQ ID NO: 7156 - DNA, 16 bp, Artificial Sequence
  Synthetic oligonucleotide
tccttgcacgtcttga

SEQ ID NO: 7157 - DNA, 16 bp, Artificial Sequence
  Synthetic oligonucleotide
tccttgcacgtcttga

SEQ ID NO: 7158 - DNA, 16 bp, Artificial Sequence
  Synthetic oligonucleotide
tccttgcacgtcttga

SEQ ID NO: 7159 - DNA, 16 bp, Artificial Sequence
  Synthetic oligonucleotide
tccttgcacgtcttga

SEQ ID NO: 7160 - DNA, 16 bp, Artificial Sequence
  Synthetic oligonucleotide
tccttgcacgtcttga

SEQ ID NO: 7161 - DNA, 16 bp, Artificial Sequence
  Synthetic oligonucleotide
tccttgcacgtcttga

SEQ ID NO: 7162 - DNA, 16 bp, Artificial Sequence
  Synthetic oligonucleotide
tccttgcacgtcttga

SEQ ID NO: 7163 - DNA, 16 bp, Artificial Sequence
  Synthetic oligonucleotide
tccttgcacgtcttga

SEQ ID NO: 7164 - DNA, 16 bp, Artificial Sequence
  Synthetic oligonucleotide
tccttgcacgtcttga

SEQ ID NO: 7165 - DNA, 16 bp, Artificial Sequence
  Synthetic oligonucleotide
tccttgcacgtcttga

SEQ ID NO: 7166 - DNA, 16 bp, Artificial Sequence
  Synthetic oligonucleotide
tccttgcacgtcttga

SEQ ID NO: 7167 - DNA, 16 bp, Artificial Sequence
  Synthetic oligonucleotide
tccttgcacgtcttga

SEQ ID NO: 7168 - DNA, 16 bp, Artificial Sequence
  Synthetic oligonucleotide
tccttgcacgtcttga

SEQ ID NO: 7169 - DNA, 16 bp, Artificial Sequence
  Synthetic oligonucleotide
tccttgcacgtcttga

SEQ ID NO: 7170 - DNA, 16 bp, Artificial Sequence
  Synthetic oligonucleotide
tccttgcacgtcttga

SEQ ID NO: 7171 - DNA, 16 bp, Artificial Sequence
  Synthetic oligonucleotide
tccttgcacgtcttga

SEQ ID NO: 7172 - DNA, 16 bp, Artificial Sequence
  Synthetic oligonucleotide
tccttgcacgtcttga

SEQ ID NO: 7173 - DNA, 16 bp, Artificial Sequence
  Synthetic oligonucleotide
tccttgcacgtcttga

SEQ ID NO: 7174 - DNA, 16 bp, Artificial Sequence
  Synthetic oligonucleotide
tccttgcacgtcttga

SEQ ID NO: 7175 - DNA, 16 bp, Artificial Sequence
  Synthetic oligonucleotide
tccttgcacgtcttga

SEQ ID NO: 7176 - DNA, 16 bp, Artificial Sequence
  Synthetic oligonucleotide
tccttgcacgtcttga

SEQ ID NO: 7177 - DNA, 16 bp, Artificial Sequence
  Synthetic oligonucleotide
tccttgcacgtcttga

SEQ ID NO: 7178 - DNA, 16 bp, Artificial Sequence
  Synthetic oligonucleotide
tccttgcacgtcttga

SEQ ID NO: 7179 - DNA, 16 bp, Artificial Sequence
  Synthetic oligonucleotide
tccttgcacgtcttga

SEQ ID NO: 7180 - DNA, 16 bp, Artificial Sequence
  Synthetic oligonucleotide
tccttgcacgtcttga

SEQ ID NO: 7181 - DNA, 16 bp, Artificial Sequence
  Synthetic oligonucleotide
tccttgcacgtcttga

SEQ ID NO: 7182 - DNA, 16 bp, Artificial Sequence
  Synthetic oligonucleotide
tccttgcacgtcttga

SEQ ID NO: 7183 - DNA, 16 bp, Artificial Sequence
  Synthetic oligonucleotide
tccttgcacgtcttga

SEQ ID NO: 7184 - DNA, 16 bp, Artificial Sequence
  Synthetic oligonucleotide
tccttgcacgtcttga

SEQ ID NO: 7185 - DNA, 16 bp, Artificial Sequence
  Synthetic oligonucleotide
tccttgcacgtcttga

SEQ ID NO: 7186 - DNA, 16 bp, Artificial Sequence
  Synthetic oligonucleotide
tccttgcacgtcttga

SEQ ID NO: 7187 - DNA, 16 bp, Artificial Sequence
  Synthetic oligonucleotide
caaggtttgttaccgg

SEQ ID NO: 7188 - DNA, 16 bp, Artificial Sequence
  Synthetic oligonucleotide
ttctggttctaagatt

SEQ ID NO: 7189 - DNA, 16 bp, Artificial Sequence
  Synthetic oligonucleotide
ttctggttctaagatt

SEQ ID NO: 7190 - DNA, 18 bp, Artificial Sequence
  Synthetic oligonucleotide
ttgagttctgtttgtaag

SEQ ID NO: 7191 - DNA, 20 bp, Artificial Sequence
  Synthetic oligonucleotide
ttgagttctgtttgtaagat

SEQ ID NO: 7192 - DNA, 19 bp, Artificial Sequence
  Synthetic oligonucleotide
ccattacaaggtttgctac

SEQ ID NO: 7193 - DNA, 17 bp, Artificial Sequence
  Synthetic oligonucleotide
ttacaaggtttgctacc

SEQ ID NO: 7194 - DNA, 15 bp, Artificial Sequence
  Synthetic oligonucleotide
acaaggtctgctacc

SEQ ID NO: 7195 - DNA, 16 bp, Artificial Sequence
  Synthetic oligonucleotide
cattacaaggtctgct

SEQ ID NO: 7196 - DNA, 15 bp, Artificial Sequence
  Synthetic oligonucleotide
ctgtgccttttaaac

SEQ ID NO: 7197 - DNA, 16 bp, Artificial Sequence
  Synthetic oligonucleotide
catacccataaatttt

SEQ ID NO: 7198 - DNA, 15 bp, Artificial Sequence
  Synthetic oligonucleotide
catacccataaattt

SEQ ID NO: 7199 - DNA, 15 bp, Artificial Sequence
  Synthetic oligonucleotide
catacccataaattt

SEQ ID NO: 7200 - DNA, 13 bp, Artificial Sequence
  Synthetic oligonucleotide
atacccataaatt

SEQ ID NO: 7201 - DNA, 15 bp, Artificial Sequence
  Synthetic oligonucleotide
taaaatttatgggta

SEQ ID NO: 7202 - DNA, 18 bp, Artificial Sequence
  Synthetic oligonucleotide
tagtaaaatttatgggta

SEQ ID NO: 7203 - DNA, 15 bp, Artificial Sequence
  Synthetic oligonucleotide
atacccataaatttt

SEQ ID NO: 7204 - DNA, 18 bp, Artificial Sequence
  Synthetic oligonucleotide
atacccataaattttact

SEQ ID NO: 7205 - DNA, 18 bp, Artificial Sequence
  Synthetic oligonucleotide
atacccataaattttact

SEQ ID NO: 7206 - DNA, 18 bp, Artificial Sequence
  Synthetic oligonucleotide
atacccataaattttact

SEQ ID NO: 7207 - DNA, 18 bp, Artificial Sequence
  Synthetic oligonucleotide
atacccataaattttact

SEQ ID NO: 7208 - DNA, 18 bp, Artificial Sequence
  Synthetic oligonucleotide
atacccataaattttact

SEQ ID NO: 7209 - DNA, 18 bp, Artificial Sequence
  Synthetic oligonucleotide
atacccataaattttact

SEQ ID NO: 7210 - DNA, 18 bp, Artificial Sequence
  Synthetic oligonucleotide
atacccataaattttact

SEQ ID NO: 7211 - DNA, 18 bp, Artificial Sequence
  Synthetic oligonucleotide
atacccataaattttact

SEQ ID NO: 7212 - DNA, 18 bp, Artificial Sequence
  Synthetic oligonucleotide
atacccataaattttact

SEQ ID NO: 7213 - DNA, 18 bp, Artificial Sequence
  Synthetic oligonucleotide
atacccataaattttact

SEQ ID NO: 7214 - DNA, 18 bp, Artificial Sequence
  Synthetic oligonucleotide
atacccataaattttact

SEQ ID NO: 7215 - DNA, 18 bp, Artificial Sequence
  Synthetic oligonucleotide
atacccataaattttact

SEQ ID NO: 7216 - DNA, 18 bp, Artificial Sequence
  Synthetic oligonucleotide
atacccataaattttact

SEQ ID NO: 7217 - DNA, 18 bp, Artificial Sequence
  Synthetic oligonucleotide
atacccataaattttact

SEQ ID NO: 7218 - DNA, 18 bp, Artificial Sequence
  Synthetic oligonucleotide
atacccataaattttact

SEQ ID NO: 7219 - DNA, 18 bp, Artificial Sequence
  Synthetic oligonucleotide
atacccataaattttact

SEQ ID NO: 7220 - DNA, 18 bp, Artificial Sequence
  Synthetic oligonucleotide
atacccataaattttact

SEQ ID NO: 7221 - DNA, 18 bp, Artificial Sequence
  Synthetic oligonucleotide
atacccataaattttact

SEQ ID NO: 7222 - DNA, 18 bp, Artificial Sequence
  Synthetic oligonucleotide
atacccataaattttact

SEQ ID NO: 7223 - DNA, 18 bp, Artificial Sequence
  Synthetic oligonucleotide
atacccataaattttact

SEQ ID NO: 7224 - DNA, 18 bp, Artificial Sequence
  Synthetic oligonucleotide
atacccataaattttact

SEQ ID NO: 7225 - DNA, 18 bp, Artificial Sequence
  Synthetic oligonucleotide
atacccataaattttact

SEQ ID NO: 7226 - DNA, 18 bp, Artificial Sequence
  Synthetic oligonucleotide
atacccataaattttact

SEQ ID NO: 7227 - DNA, 18 bp, Artificial Sequence
  Synthetic oligonucleotide
atacccataaattttact

SEQ ID NO: 7228 - DNA, 18 bp, Artificial Sequence
  Synthetic oligonucleotide
atacccataaattttact

SEQ ID NO: 7229 - DNA, 18 bp, Artificial Sequence
  Synthetic oligonucleotide
atacccataaattttact

SEQ ID NO: 7230 - DNA, 18 bp, Artificial Sequence
  Synthetic oligonucleotide
atacccataaattttact

SEQ ID NO: 7231 - DNA, 18 bp, Artificial Sequence
  Synthetic oligonucleotide
atacccataaattttact

SEQ ID NO: 7232 - DNA, 18 bp, Artificial Sequence
  Synthetic oligonucleotide
atacccataaattttact

SEQ ID NO: 7233 - DNA, 18 bp, Artificial Sequence
  Synthetic oligonucleotide
atacccataaattttact

SEQ ID NO: 7234 - DNA, 18 bp, Artificial Sequence
  Synthetic oligonucleotide
atacccataaattttact

SEQ ID NO: 7235 - DNA, 18 bp, Artificial Sequence
  Synthetic oligonucleotide
atacccataaattttact

SEQ ID NO: 7236 - DNA, 18 bp, Artificial Sequence
  Synthetic oligonucleotide
atacccataaattttact

SEQ ID NO: 7237 - DNA, 18 bp, Artificial Sequence
  Synthetic oligonucleotide
atacccataaattttact

SEQ ID NO: 7238 - DNA, 18 bp, Artificial Sequence
  Synthetic oligonucleotide
atacccataaattttact

SEQ ID NO: 7239 - DNA, 18 bp, Artificial Sequence
  Synthetic oligonucleotide
atacccataaattttact

SEQ ID NO: 7240 - DNA, 18 bp, Artificial Sequence
  Synthetic oligonucleotide
atacccataaattttact

SEQ ID NO: 7241 - DNA, 18 bp, Artificial Sequence
  Synthetic oligonucleotide
atacccataaattttact

SEQ ID NO: 7242 - DNA, 18 bp, Artificial Sequence
  Synthetic oligonucleotide
atacccataaattttact

SEQ ID NO: 7243 - DNA, 18 bp, Artificial Sequence
  Synthetic oligonucleotide
atacccataaattttact

SEQ ID NO: 7244 - DNA, 18 bp, Artificial Sequence
  Synthetic oligonucleotide
atacccataaattttact

SEQ ID NO: 7245 - DNA, 18 bp, Artificial Sequence
  Synthetic oligonucleotide
atacccataaattttact

SEQ ID NO: 7246 - DNA, 18 bp, Artificial Sequence
  Synthetic oligonucleotide
atacccataaattttact

SEQ ID NO: 7247 - DNA, 18 bp, Artificial Sequence
  Synthetic oligonucleotide
atacccataaattttact

SEQ ID NO: 7248 - DNA, 18 bp, Artificial Sequence
  Synthetic oligonucleotide
atacccataaattttact

SEQ ID NO: 7249 - DNA, 18 bp, Artificial Sequence
  Synthetic oligonucleotide
atacccataaattttact

SEQ ID NO: 7250 - DNA, 18 bp, Artificial Sequence
  Synthetic oligonucleotide
atacccataaattttact

SEQ ID NO: 7251 - DNA, 18 bp, Artificial Sequence
  Synthetic oligonucleotide
atacccataaattttact

SEQ ID NO: 7252 - DNA, 18 bp, Artificial Sequence
  Synthetic oligonucleotide
atacccataaattttact

SEQ ID NO: 7253 - DNA, 18 bp, Artificial Sequence
  Synthetic oligonucleotide
atacccataaattttact

SEQ ID NO: 7254 - DNA, 18 bp, Artificial Sequence
  Synthetic oligonucleotide
atacccataaattttact

SEQ ID NO: 7255 - DNA, 18 bp, Artificial Sequence
  Synthetic oligonucleotide
atacccataaattttact

SEQ ID NO: 7256 - DNA, 18 bp, Artificial Sequence
  Synthetic oligonucleotide
atacccataaattttact

SEQ ID NO: 7257 - DNA, 18 bp, Artificial Sequence
  Synthetic oligonucleotide
atacccataaattttact

SEQ ID NO: 7258 - DNA, 18 bp, Artificial Sequence
  Synthetic oligonucleotide
atacccataaattttact

SEQ ID NO: 7259 - DNA, 18 bp, Artificial Sequence
  Synthetic oligonucleotide
atacccataaattttact

SEQ ID NO: 7260 - DNA, 18 bp, Artificial Sequence
  Synthetic oligonucleotide
atacccataaattttact

SEQ ID NO: 7261 - DNA, 18 bp, Artificial Sequence
  Synthetic oligonucleotide
atacccataaattttact

SEQ ID NO: 7262 - DNA, 18 bp, Artificial Sequence
  Synthetic oligonucleotide
atacccataaattttact

SEQ ID NO: 7263 - DNA, 18 bp, Artificial Sequence
  Synthetic oligonucleotide
atacccataaattttact

SEQ ID NO: 7264 - DNA, 18 bp, Artificial Sequence
  Synthetic oligonucleotide
atacccataaattttact

SEQ ID NO: 7265 - DNA, 18 bp, Artificial Sequence
  Synthetic oligonucleotide
atacccataaattttact

SEQ ID NO: 7266 - DNA, 18 bp, Artificial Sequence
  Synthetic oligonucleotide
atacccataaattttact

SEQ ID NO: 7267 - DNA, 18 bp, Artificial Sequence
  Synthetic oligonucleotide
atacccataaattttact

SEQ ID NO: 7268 - DNA, 17 bp, Artificial Sequence
  Synthetic oligonucleotide
agtgtctatggccaaga

SEQ ID NO: 7269 - DNA, 15 bp, Artificial Sequence
  Synthetic oligonucleotide
ttctcaatggaagca

SEQ ID NO: 7270 - DNA, 16 bp, Artificial Sequence
  Synthetic oligonucleotide
ttctcaatggaagcaa

SEQ ID NO: 7271 - DNA, 17 bp, Artificial Sequence
  Synthetic oligonucleotide
atgcttcatttgtaaac

SEQ ID NO: 7272 - DNA, 17 bp, Artificial Sequence
  Synthetic oligonucleotide
tatggtttccgacccac

SEQ ID NO: 7273 - DNA, 16 bp, Artificial Sequence
  Synthetic oligonucleotide
ttagtgggtcggaaac

SEQ ID NO: 7274 - DNA, 17 bp, Artificial Sequence
  Synthetic oligonucleotide
atgcttcatttgtaaac

SEQ ID NO: 7275 - DNA, 18 bp, Artificial Sequence
  Synthetic oligonucleotide
atgcttcatttgtaaaca

SEQ ID NO: 7276 - DNA, 20 bp, Artificial Sequence
  Synthetic oligonucleotide
tgctgattattctttcctat

SEQ ID NO: 7277 - DNA, 23 bp, Artificial Sequence
  Synthetic oligonucleotide
tgttgctgattattctttcctat

SEQ ID NO: 7278 - DNA, 15 bp, Artificial Sequence
  Synthetic oligonucleotide
ttgctgctttttaca

SEQ ID NO: 7279 - DNA, 18 bp, Artificial Sequence
  Synthetic oligonucleotide
atgctatacatttctctg

SEQ ID NO: 7280 - DNA, 20 bp, Artificial Sequence
  Synthetic oligonucleotide
catgctatacatttctctgg

SEQ ID NO: 7281 - DNA, 14 bp, Artificial Sequence
  Synthetic oligonucleotide
tcccagagaaatgt

SEQ ID NO: 7282 - DNA, 15 bp, Artificial Sequence
  Synthetic oligonucleotide
tttccatacaacttt

SEQ ID NO: 7283 - DNA, 15 bp, Artificial Sequence
  Synthetic oligonucleotide
tttccatacaacttt

SEQ ID NO: 7284 - DNA, 17 bp, Artificial Sequence
  Synthetic oligonucleotide
acaaaagtttgatggaa

SEQ ID NO: 7285 - DNA, 16 bp, Artificial Sequence
  Synthetic oligonucleotide
ctttccatcaaacttt

SEQ ID NO: 7286 - DNA, 16 bp, Artificial Sequence
  Synthetic oligonucleotide
cttcaggtttgacagc

SEQ ID NO: 7287 - DNA, 16 bp, Artificial Sequence
  Synthetic oligonucleotide
cttcaggtttgacagc

SEQ ID NO: 7288 - DNA, 21 bp, Artificial Sequence
  Synthetic oligonucleotide
ttttgttgtttttgtgataaa

SEQ ID NO: 7289 - DNA, 14 bp, Artificial Sequence
  Synthetic oligonucleotide
tgtggtgataaaca

SEQ ID NO: 7290 - DNA, 18 bp, Artificial Sequence
  Synthetic oligonucleotide
aattacctgtttagattg

SEQ ID NO: 7291 - DNA, 18 bp, Artificial Sequence
  Synthetic oligonucleotide
aaggtttgagtttagact

SEQ ID NO: 7292 - DNA, 19 bp, Artificial Sequence
  Synthetic oligonucleotide
aaaaggtttgagtttagac

SEQ ID NO: 7293 - DNA, 17 bp, Artificial Sequence
  Synthetic oligonucleotide
tttttgtggtaaacacc

SEQ ID NO: 7294 - DNA, 20 bp, Artificial Sequence
  Synthetic oligonucleotide
ccatttttgggtgtttacaa

SEQ ID NO: 7295 - DNA, 13 bp, Artificial Sequence
  Synthetic oligonucleotide
cactgctggtttt

SEQ ID NO: 7296 - DNA, 18 bp, Artificial Sequence
  Synthetic oligonucleotide
atgataacacctcaaggt

SEQ ID NO: 7297 - DNA, 18 bp, Artificial Sequence
  Synthetic oligonucleotide
atgataacacctcaaggt

SEQ ID NO: 7298 - DNA, 18 bp, Artificial Sequence
  Synthetic oligonucleotide
atgataacacctcaaggt

SEQ ID NO: 7299 - DNA, 15 bp, Artificial Sequence
  Synthetic oligonucleotide
acgtcatggtactct

SEQ ID NO: 7300 - DNA, 15 bp, Artificial Sequence
  Synthetic oligonucleotide
acgtcatggtactct

SEQ ID NO: 7301 - DNA, 15 bp, Artificial Sequence
  Synthetic oligonucleotide
acgtcatggtactct

SEQ ID NO: 7302 - DNA, 16 bp, Artificial Sequence
  Synthetic oligonucleotide
tttcttgaaagtcttc

SEQ ID NO: 7303 - DNA, 16 bp, Artificial Sequence
  Synthetic oligonucleotide
tttcttgaaagtcttc

SEQ ID NO: 7304 - DNA, 16 bp, Artificial Sequence
  Synthetic oligonucleotide
tttcttgaaagtcttc

SEQ ID NO: 7305 - DNA, 18 bp, Artificial Sequence
  Synthetic oligonucleotide
tgtcgccccaagcaactt

SEQ ID NO: 7306 - DNA, 20 bp, Artificial Sequence
  Synthetic oligonucleotide
gcctgtgaacgcgagttaga

SEQ ID NO: 7307 - DNA, 24 bp, Artificial Sequence
  Synthetic oligonucleotide
atccattcagcgaccccgttagcg

SEQ ID NO: 7308 - DNA, 19 bp, Artificial Sequence
  Synthetic oligonucleotide
agatttggacctgcgagcg

SEQ ID NO: 7309 - DNA, 20 bp, Artificial Sequence
  Synthetic oligonucleotide
gagcggctgtctccacaagt

SEQ ID NO: 7310 - DNA, 23 bp, Artificial Sequence
  Synthetic oligonucleotide
ttctgacctgaaggctctgcgcg

SEQ ID NO: 7311 - DNA, 2001 bp, Severe acute respiratory syndrome coronavirus 2
tgaaaagagctatgaattgcagacaccttttgaaattaaattggcaaagaaatttgacaccttcaatggggaatgtccaaattttgtatttcccttaaattccataatcaagactattcaaccaagggttgaaaagaaaaagcttgatggctttatgggtagaattcgatctgtctatccagttgcgtcaccaaatgaatgcaaccaaatgtgcctttcaactctcatgaagtgtgatcattgtggtgaaacttcatggcagacgggcgattttgttaaagccacttgcgaattttgtggcactgagaatttgactaaagaaggtgccactacttgtggttacttaccccaaaatgctgttgttaaaatttattgtccagcatgtcacaattcagaagtaggacctgagcatagtcttgccgaataccataatgaatctggcttgaaaaccattcttcgtaagggtggtcgcactattgcctttggaggctgtgtgttctcttatgttggttgccataacaagtgtgcctattgggttccacgtgctagcgctaacataggttgtaaccatacaggtgttgttggagaaggttccgaaggtcttaatgacaaccttcttgaaatactccaaaaagagaaagtcaacatcaatattgttggtgactttaaacttaatgaagagatcgccattattttggcatctttttctgcttccacaagtgcttttgtggaaactgtgaaaggtttggattataaagcattcaaacaaattgttgaatcctgtggtaattttaaagttacaaaaggaaaagctaaaaaaggtgcctggaatattggtgaacagaaatcaatactgagtcctctttatgcatttgcatcagaggctgctcgtgttgtacgatcaattttctcccgcactcttgaaactgctcaaaattctgtgcgtgttttacagaaggccgctataacaatactagatggaatttcacagtattcactgagactcattgatgctatgatgttcacatctgatttggctactaacaatctagttgtaatggcctacattacaggtggtgttgttcagttgacttcgcagtggctaactaacatctttggcactgtttatgaaaaactcaaacccgtccttgattggcttgaagagaagtttaaggaaggtgtagagtttcttagagacggttgggaaattgttaaatttatctcaacctgtgcttgtgaaattgtcggtggacaaattgtcacctgtgcaaaggaaattaaggagagtgttcagacattctttaagcttgtaaataaatttttggctttgtgtgctgactctatcattattggtggagctaaacttaaagccttgaatttaggtgaaacatttgtcacgcactcaaagggattgtacagaaagtgtgttaaatccagagaagaaactggcctactcatgcctctaaaagccccaaaagaaattatcttcttagagggagaaacacttcccacagaagtgttaacagaggaagttgtcttgaaaactggtgatttacaaccattagaacaacctactagtgaagctgttgaagctccattggttggtacaccagtttgtattaacgggcttatgttgctcgaaatcaaagacacagaaaagtactgtgcccttgcacctaatatgatggtaacaaacaataccttcacactcaaaggcggtgcaccaacaaaggttacttttggtgatgacactgtgatagaagtgcaaggttacaagagtgtgaatatcacttttgaacttgatgaaaggattgataaagtacttaatgagaagtgctctgcctatacagttgaactcggtacagaagtaaatgagttcgcctgtgttgtggcagatgctgtcataaaaactttgcaaccagtatctgaattacttacaccactgggcattgatttagatgagtggagtatggctacatactacttatttgatgagtctgg

SEQ ID NO: 7312 - DNA, 2001 bp, Severe acute respiratory syndrome coronavirus 2
tgtttgtttttcttgttttattgccactagtctctagtcagtgtgttaatcttacaaccagaactcaattaccccctgcatacactaattctttcacacgtggtgtttattaccctgacaaagttttcagatcctcagttttacattcaactcaggacttgttcttacctttcttttccaatgttacttggttccatgctatacatgtctctgggaccaatggtactaagaggtttgataaccctgtcctaccatttaatgatggtgtttattttgcttccactgagaagtctaacataataagaggctggatttttggtactactttagattcgaagacccagtccctacttattgttaataacgctactaatgttgttattaaagtctgtgaatttcaattttgtaatgatccatttttgggtgtttattaccacaaaaacaacaaaagttggatggaaagtgagttcagagtttattctagtgcgaataattgcacttttgaatatgtctctcagccttttcttatggaccttgaaggaaaacagggtaatttcaaaaatcttagggaatttgtgtttaagaatattgatggttattttaaaatatattctaagcacacgcctattaatttagtgcgtgatctccctcagggtttttcggctttagaaccattggtagatttgccaataggtattaacatcactaggtttcaaactttacttgctttacatagaagttatttgactcctggtgattcttcttcaggttggacagctggtgctgcagcttattatgtgggttatcttcaacctaggacttttctattaaaatataatgaaaatggaaccattacagatgctgtagactgtgcacttgaccctctctcagaaacaaagtgtacgttgaaatccttcactgtagaaaaaggaatctatcaaacttctaactttagagtccaaccaacagaatctattgttagatttcctaatattacaaacttgtgcccttttggtgaagtttttaacgccaccagatttgcatctgtttatgcttggaacaggaagagaatcagcaactgtgttgctgattattctgtcctatataattccgcatcattttccacttttaagtgttatggagtgtctcctactaaattaaatgatctctgctttactaatgtctatgcagattcatttgtaattagaggtgatgaagtcagacaaatcgctccagggcaaactggaaagattgctgattataattataaattaccagatgattttacaggctgcgttatagcttggaattctaacaatcttgattctaaggttggtggtaattataattacctgtatagattgtttaggaagtctaatctcaaaccttttgagagagatatttcaactgaaatctatcaggccggtagcacaccttgtaatggtgttgaaggttttaattgttactttcctttacaatcatatggtttccaacccactaatggtgttggttaccaaccatacagagtagtagtactttcttttgaacttctacatgcaccagcaactgtttgtggacctaaaaagtctactaatttggttaaaaacaaatgtgtcaatttcaacttcaatggtttaacaggcacaggtgttcttactgagtctaacaaaaagtttctgcctttccaacaatttggcagagacattgctgacactactgatgctgtccgtgatccacagacacttgagattcttgacattacaccatgttcttttggtggtgtcagtgttataacaccaggaacaaatacttctaaccaggttgctgttctttatcaggatgttaactgcacagaagtccctgttgctattcatgcagatcaacttactcctacttggcgtgtttattctacaggttctaatgtttttcaaacacgtgcaggctgtttaataggggctgaacatgtcaacaactcatatgagtgtgacatacccattggtg

SEQ ID NO: 7313 - DNA, 1284 bp, Severe acute respiratory syndrome coronavirus 2
tgtctgataatggaccccaaaatcagcgaaatgcaccccgcattacgtttggtggaccctcagattcaactggcagtaaccagaatggagaacgcagtggggcgcgatcaaaacaacgtcggccccaaggtttacccaataatactgcgtcttggttcaccgctctcactcaacatggcaaggaagaccttaaattccctcgaggacaaggcgttccaattaacaccaatagcagtccagatgaccaaattggctactaccgaagagctaccagacgaattcgtggtggtgacggtaaaatgaaagatctcagtccaagatggtatttctactacctaggaactgggccagaagctggacttccctatggtgctaacaaagacggcatcatatgggttgcaactgagggagccttgaatacaccaaaagatcacattggcacccgcaatcctgctaacaatgctgcaatcgtgctacaacttcctcaaggaacaacattgccaaaaggcttctacgcagaagggagcagaggcggcagtcaagcctcttctcgttcctcatcacgtagtcgcaacagttcaagaaattcaactccaggcagcagtaggggaacttctcctgctagaatggctggcaatggcggtgatgctgctcttgctttgctgctgcttgacagattgaaccagcttgagagcaaaatgtctggtaaaggccaacaacaacaaggccaaactgtcactaagaaatctgctgctgaggcttctaagaagcctcggcaaaaacgtactgccactaaagcatacaatgtaacacaagctttcggcagacgtggtccagaacaaacccaaggaaattttggggaccaggaactaatcagacaaggaactgattacaaacattggccgcaaattgcacaatttgcccccagcgcttcagcgttcttcggaatgtcgcgcattggcatggaagtcacaccttcgggaacgtggttgacctacacaggtgccatcaaattggatgacaaagatccaaatttcaaagatcaagtcattttgctgaataagcatattgacgcatacaaaacattcccaccaacagagcctaaaaaggacaaaaagaagaaggctgatgaaactcaagccttaccgcagagacagaagaaacagcaaactgtgactcttcttcctgctgcagatttggatgatttctccaaacaattgcaacaatccatgagcagtgctgactcaactcaggcctaaactcatgcagaccacacaaggcaga

1. A composition for detecting the presence of SARS-CoV-2 in a biological sample, comprising a nucleic acid primer and/or probe with a sequence having at least 75%, at least 80%, at least 85%, at least 90%, at least 95%, at least 97%, at least 98%, at least 99%, or 100% homology to: SEQ ID NO:1 to SEQ ID NO:1304; SEQ ID NO:2001 to SEQ ID NO:3304; SEQ ID NO:4001 to SEQ ID NO:5304; and/or SEQ ID NO:6001 to SEQ ID NO:7304.

2. The composition of claim 1, comprising:
a forward primer having at least 75%, at least 80%, at least 85%, at least 90%, at least 95%, at least 97%, at least 98%, at least 99%, or 100% homology to a sequence selected from SEQ ID NO:1 to SEQ ID NO:1304; and
a reverse primer having at least 75%, at least 80%, at least 85%, at least 90%, at least 95%, at least 97%, at least 98%, at least 99%, or 100% homology to a sequence selected from SEQ ID NO:2001 to SEQ ID NO:3304.

3. The composition of claim 2, wherein the composition further comprises one or both of:
a probe configured for association with a reference SARS-CoV-2 allele, the probe having at least 75%, at least 80%, at least 85%, at least 90%, at least 95%, at least 97%, at least 98%, at least 99%, or 100% homology to SEQ ID NO:4001 to SEQ ID NO:5304;
a probe configured for association with a mutant SARS-CoV-2 allele, the probe having at least 75%, at least 80%, at least 85%, at least 90%, at least 95%, at least 97%, at least 98%, at least 99%, or 100% homology to SEQ ID NO:6001 to SEQ ID NO:7304.

4. (canceled)

5. The composition of claim 3, comprising:
SEQ ID NO:X as a forward primer;
SEQ ID NO:(X+2000) as a reverse primer;
optionally SEQ ID NO:(X+4000) as a probe configured for detecting a reference SARS-CoV-2 allele; and
SEQ ID NO:(X+6000) as a probe configured for detecting a mutant SARS-CoV-2 allele, wherein X is from 1 to 1304.

6. (canceled)

7. (canceled)

8. The composition of claim 3, formulated to target one or more of an Alpha, Delta, or Omicron variant of SARS-CoV-2.

9. The composition of claim 8, formulated to target the Alpha variant of SARS-CoV-2.

10. The composition of claim 9, comprising two or more of:
an assay including one of SEQ ID NO:560 through SEQ ID NO:562 as a forward primer, one of SEQ ID NO:2560 through SEQ ID NO:2562 as a reverse primer, one of SEQ ID NO:4560 through SEQ ID NO:4562 as a probe configured to target a reference SARS-CoV-2 allele, and one of SEQ ID NO:6560 through SEQ ID NO:6562 as a probe configured to target a mutant SARS-CoV-2 allele;
an assay including SEQ ID NO:564 as a forward primer, SEQ ID NO:2564 as a reverse primer, SEQ ID NO:4564 as a probe configured to target a reference SARS-CoV-2 allele, and SEQ ID NO:6564 as a probe configured to target a mutant SARS-CoV-2 allele;
an assay including one of SEQ ID NO:803 through SEQ ID NO:809 as a forward primer, one of SEQ ID NO:2803 through SEQ ID NO:2809 as a reverse primer, one of SEQ ID NO:4803 through SEQ ID NO:4809 as a probe configured to target a reference SARS-CoV-2 allele, and one of SEQ ID NO:6803 through SEQ ID NO:6809 as a probe configured to target a mutant SARS-CoV-2 allele;
an assay including one of SEQ ID NO:820 through SEQ ID NO:967 as a forward primer, one of SEQ ID NO:2820 through SEQ ID NO:2967 as a reverse primer, one of SEQ ID NO:4820 through SEQ ID NO:4967 as a probe configured to target a reference SARS-CoV-2 allele, and one of SEQ ID NO:6820 through SEQ ID NO:6967 as a probe configured to target a mutant SARS-CoV-2 allele;
an assay including SEQ ID NO:28 as a forward primer, SEQ ID NO:2028 as a reverse primer, SEQ ID NO:4028 as a probe configured to target a reference SARS-CoV-2 allele, and SEQ ID NO:6028 as a probe configured to target a mutant SARS-CoV-2 allele;
an assay including one of SEQ ID NO:336 through SEQ ID NO:380 as a forward primer, one of SEQ ID NO:2336 through SEQ ID NO:2380 as a reverse primer, one of SEQ ID NO:4336 through SEQ ID NO:4380 as a probe configured to target a reference SARS-CoV-2 allele, and one of SEQ ID NO:6336 through SEQ ID NO:6380 as a probe configured to target a mutant SARS-CoV-2 allele;
an assay including one of SEQ ID NO:93 through SEQ ID NO:323 as a forward primer, one of SEQ ID NO:2093 through SEQ ID NO:2323 as a reverse primer, one of SEQ ID NO:4093 through SEQ ID NO:4323 as a probe configured to target a reference SARS-CoV-2 allele, and one of SEQ ID NO:6093 through SEQ ID NO:6323 as a probe configured to target a mutant SARS-CoV-2 allele;
an assay including one of SEQ ID NO:1063 through SEQ ID NO:1186 as a forward primer, one of SEQ ID NO:3063 through SEQ ID NO:3186 as a reverse primer, one of SEQ ID NO:5063 through SEQ ID NO:5186 as a probe configured to target a reference SARS-CoV-2 allele, and one of SEQ ID NO:7063 through SEQ ID NO:7186 as a probe configured to target a mutant SARS-CoV-2 allele;
an assay including one of SEQ ID NO:1197 through SEQ ID NO:1267 as a forward primer, one of SEQ ID NO:3197 through SEQ ID NO:3267 as a reverse primer, one of SEQ ID NO:5197 through SEQ ID NO:5267 as a probe configured to target a reference SARS-CoV-2 allele, and one of SEQ ID NO:7197 through SEQ ID NO:7267 as a probe configured to target a mutant SARS-CoV-2 allele.

11. The composition of claim 9, comprising two or more of:
an assay including one of SEQ ID NO:560 through SEQ ID NO:562 as a forward primer, one of SEQ ID NO:2560 through SEQ ID NO:2562 as a reverse primer, one of SEQ ID NO:4560 through SEQ ID NO:4562 as a probe configured to target a reference SARS-CoV-2 allele, and one of SEQ ID NO:6560 through SEQ ID NO:6562 as a probe configured to target a mutant SARS-CoV-2 allele;
an assay including SEQ ID NO:564 as a forward primer, SEQ ID NO:2564 as a reverse primer, SEQ ID NO:4564 as a probe configured to target a reference SARS-CoV-2 allele, and SEQ ID NO:6564 as a probe configured to target a mutant SARS-CoV-2 allele;
an assay including one of SEQ ID NO:803 through SEQ ID NO:809 as a forward primer, one of SEQ ID NO:2803 through SEQ ID NO:2809 as a reverse primer, one of SEQ ID NO:4803 through SEQ ID NO:4809 as a probe configured to target a reference SARS-CoV-2 allele, and one of SEQ ID NO:6803 through SEQ ID NO:6809 as a probe configured to target a mutant SARS-CoV-2 allele;
an assay including one of SEQ ID NO:820 through SEQ ID NO:824 as a forward primer, one of SEQ ID NO:2820 through SEQ ID NO:2824 as a reverse primer, one of SEQ ID NO:4820 through SEQ ID NO:4824 as a probe configured to target a reference SARS-CoV-2 allele, and one of SEQ ID NO:6820 through SEQ ID NO:6824 as a probe configured to target a mutant SARS-CoV-2 allele;
an assay including SEQ ID NO:28 as a forward primer, SEQ ID NO:2028 as a reverse primer, SEQ ID NO:4028 as a probe configured to target a reference SARS-CoV-2 allele, and SEQ ID NO:6028 as a probe configured to target a mutant SARS-CoV-2 allele;
an assay including one of SEQ ID NO:336 through SEQ ID NO:339 as a forward primer, one of SEQ ID NO:2336 through SEQ ID NO:2339 as a reverse primer, one of SEQ ID NO:4336 through SEQ ID NO:4339 as a probe configured to target a reference SARS-CoV-2 allele, and one of SEQ ID NO:6336 through SEQ ID NO:6339 as a probe configured to target a mutant SARS-CoV-2 allele;
an assay including one of SEQ ID NO:93 through SEQ ID NO:102 as a forward primer, one of SEQ ID NO:2093 through SEQ ID NO:2102 as a reverse primer, one of SEQ ID NO:4093 through SEQ ID NO:4102 as a probe configured to target a reference SARS-CoV-2 allele, and one of SEQ ID NO:6093 through SEQ ID NO:6102 as a probe configured to target a mutant SARS-CoV-2 allele;
an assay including SEQ ID NO:1063 as a forward primer, SEQ ID NO:3063 as a reverse primer, SEQ ID NO:5063 as a probe configured to target a reference SARS-CoV-2 allele, and SEQ ID NO:7063 as a probe configured to target a mutant SARS-CoV-2 allele;
an assay including one of SEQ ID NO:1197 through SEQ ID NO:1203 as a forward primer, one of SEQ ID NO:3197 through SEQ ID NO:3203 as a reverse primer, one of SEQ ID NO:5197 through SEQ ID NO:5203 as a probe configured to target a reference SARS-CoV-2 allele, and one of SEQ ID NO:7197 through SEQ ID NO:7203 as a probe configured to target a mutant SARS-CoV-2 allele.

12. The composition of claim 8, formulated to target the Delta variant of SARS-CoV-2.

13. The composition of claim 12, comprising two or more of:
an assay including SEQ ID NO:784 as a forward primer, SEQ ID NO:2784 as a reverse primer, SEQ ID NO:4784 as a probe configured to target a reference SARS-CoV-2 allele, and SEQ ID NO:6784 as a probe configured to target a mutant SARS-CoV-2 allele;
an assay including SEQ ID NO:968 as a forward primer, SEQ ID NO:2968 as a reverse primer, SEQ ID NO:4968 as a probe configured to target a reference SARS-CoV-2 allele, and SEQ ID NO:6968 as a probe configured to target a mutant SARS-CoV-2 allele;
an assay including one of SEQ ID NO:607 through SEQ ID NO:608 as a forward primer, one of SEQ ID NO:2607 through SEQ ID NO:2608 as a reverse primer, one of SEQ ID NO:4607 through SEQ ID NO:4608 as a probe configured to target a reference SARS-CoV-2 allele, and one of SEQ ID NO:6607 through SEQ ID NO:6608 as a probe configured to target a mutant SARS-CoV-2 allele;
an assay including one of SEQ ID NO:1188 through SEQ ID NO:1189 as a forward primer, one of SEQ ID NO:3188 through SEQ ID NO:3189 as a reverse primer, one of SEQ ID NO:5188 through SEQ ID NO:5189 as a probe configured to target a reference SARS-CoV-2 allele, and one of SEQ ID NO:7188 through SEQ ID NO:7189 as a probe configured to target a mutant SARS-CoV-2 allele;
an assay including one of SEQ ID NO:1192 through SEQ ID NO:1193 as a forward primer, one of SEQ ID NO:3192 through SEQ ID NO:3193 as a reverse primer, one of SEQ ID NO:5192 through SEQ ID NO:5193 as a probe configured to target a reference SARS-CoV-2 allele, and one of SEQ ID NO:7192 through SEQ ID NO:7193 as a probe configured to target a mutant SARS-CoV-2 allele.

14. The composition of claim 8, formulated to target the Omicron variant of SARS-CoV-2.

15. The composition of claim 14, comprising two or more of:
an assay including one of SEQ ID NO:61 through SEQ ID NO:62 as a forward primer, one of SEQ ID NO:2061 through SEQ ID NO:2062 as a reverse primer, one of SEQ ID NO:4061 through SEQ ID NO:4062 as a probe configured to target a reference SARS-CoV-2 allele, and one of SEQ ID NO:6061 through SEQ ID NO:6062 as a probe configured to target a mutant SARS-CoV-2 allele;
an assay including SEQ ID NO:616 as a forward primer, SEQ ID NO:2616 as a reverse primer, SEQ ID NO:4616 as a probe configured to target a reference SARS-CoV-2 allele, and SEQ ID NO:6616 as a probe configured to target a mutant SARS-CoV-2 allele;
an assay including one of SEQ ID NO:972 through SEQ ID NO:975 as a forward primer, one of SEQ ID NO:2972 through SEQ ID NO:2975 as a reverse primer, one of SEQ ID NO:4972 through SEQ ID NO:4975 as a probe configured to target a reference SARS-CoV-2 allele, and one of SEQ ID NO:6972 through SEQ ID NO:6975 as a probe configured to target a mutant SARS-CoV-2 allele;
an assay including one of SEQ ID NO:71 through SEQ ID NO:72 as a forward primer, one of SEQ ID NO:2071 through SEQ ID NO:2072 as a reverse primer, one of SEQ ID NO:4071 through SEQ ID NO:4072 as a probe configured to target a reference SARS-CoV-2 allele, and one of SEQ ID NO:6071 through SEQ ID NO:6072 as a probe configured to target a mutant SARS-CoV-2 allele;
an assay including SEQ ID NO:1196 as a forward primer, SEQ ID NO:3196 as a reverse primer, SEQ ID NO:5196 as a probe configured to target a reference SARS-CoV-2 allele, and SEQ ID NO:7196 as a probe configured to target a mutant SARS-CoV-2 allele.

16. The composition of claim 8, formulated to target and/or distinguish between the Alpha and Delta variants of SARS-CoV-2.

17. The composition of claim 16, comprising at least one assay formulated for targeting the Alpha variant selected from:
an assay including one of SEQ ID NO:560 through SEQ ID NO:562 as a forward primer, one of SEQ ID NO:2560 through SEQ ID NO:2562 as a reverse primer, one of SEQ ID NO:4560 through SEQ ID NO:4562 as a probe configured to target a reference SARS-CoV-2 allele, and one of SEQ ID NO:6560 through SEQ ID NO:6562 as a probe configured to target a mutant SARS-CoV-2 allele;
an assay including SEQ ID NO:564 as a forward primer, SEQ ID NO:2564 as a reverse primer, SEQ ID NO:4564 as a probe configured to target a reference SARS-CoV-2 allele, and SEQ ID NO:6564 as a probe configured to target a mutant SARS-CoV-2 allele;
an assay including one of SEQ ID NO:803 through SEQ ID NO:809 as a forward primer, one of SEQ ID NO:2803 through SEQ ID NO:2809 as a reverse primer, one of SEQ ID NO:4803 through SEQ ID NO:4809 as a probe configured to target a reference SARS-CoV-2 allele, and one of SEQ ID NO:6803 through SEQ ID NO:6809 as a probe configured to target a mutant SARS-CoV-2 allele;
an assay including one of SEQ ID NO:820 through SEQ ID NO:967 as a forward primer, one of SEQ ID NO:2820 through SEQ ID NO:2967 as a reverse primer, one of SEQ ID NO:4820 through SEQ ID NO:4967 as a probe configured to target a reference SARS-CoV-2 allele, and one of SEQ ID NO:6820 through SEQ ID NO:6967 as a probe configured to target a mutant SARS-CoV-2 allele;
an assay including SEQ ID NO:28 as a forward primer, SEQ ID NO:2028 as a reverse primer, SEQ ID NO:4028 as a probe configured to target a reference SARS-CoV-2 allele, and SEQ ID NO:6028 as a probe configured to target a mutant SARS-CoV-2 allele;
an assay including one of SEQ ID NO:336 through SEQ ID NO:380 as a forward primer, one of SEQ ID NO:2336 through SEQ ID NO:2380 as a reverse primer, one of SEQ ID NO:4336 through SEQ ID NO:4380 as a probe configured to target a reference SARS-CoV-2 allele, and one of SEQ ID NO:6336 through SEQ ID NO:6380 as a probe configured to target a mutant SARS-CoV-2 allele;
an assay including one of SEQ ID NO:93 through SEQ ID NO:323 as a forward primer, one of SEQ ID NO:2093 through SEQ ID NO:2323 as a reverse primer, one of SEQ ID NO:4093 through SEQ ID NO:4323 as a probe configured to target a reference SARS-CoV-2 allele, and one of SEQ ID NO:6093 through SEQ ID NO:6323 as a probe configured to target a mutant SARS-CoV-2 allele;
an assay including one of SEQ ID NO:1063 through SEQ ID NO:1186 as a forward primer, one of SEQ ID NO:3063 through SEQ ID NO:3186 as a reverse primer, one of SEQ ID NO:5063 through SEQ ID NO:5186 as a probe configured to target a reference SARS-CoV-2 allele, and one of SEQ ID NO:7063 through SEQ ID NO:7186 as a probe configured to target a mutant SARS-CoV-2 allele;
an assay including one of SEQ ID NO:1197 through SEQ ID NO:1267 as a forward primer, one of SEQ ID NO:3197 through SEQ ID NO:3267 as a reverse primer, one of SEQ ID NO:5197 through SEQ ID NO:5267 as a probe configured to target a reference SARS-CoV-2 allele, and one of SEQ ID NO:7197 through SEQ ID NO:7267 as a probe configured to target a mutant SARS-CoV-2 allele; and
at least one assay formulated for targeting the Delta variant selected from:
an assay including SEQ ID NO:784 as a forward primer, SEQ ID NO:2784 as a reverse primer, SEQ ID NO:4784 as a probe configured to target a reference SARS-CoV-2 allele, and SEQ ID NO:6784 as a probe configured to target a mutant SARS-CoV-2 allele;
an assay including SEQ ID NO:968 as a forward primer, SEQ ID NO:2968 as a reverse primer, SEQ ID NO:4968 as a probe configured to target a reference SARS-CoV-2 allele, and SEQ ID NO:6968 as a probe configured to target a mutant SARS-CoV-2 allele;
an assay including one of SEQ ID NO:607 through SEQ ID NO:608 as a forward primer, one of SEQ ID NO:2607 through SEQ ID NO:2608 as a reverse primer, one of SEQ ID NO:4607 through SEQ ID NO:4608 as a probe configured to target a reference SARS-CoV-2 allele, and one of SEQ ID NO:6607 through SEQ ID NO:6608 as a probe configured to target a mutant SARS-CoV-2 allele;
an assay including one of SEQ ID NO:1188 through SEQ ID NO:1189 as a forward primer, one of SEQ ID NO:3188 through SEQ ID NO:3189 as a reverse primer, one of SEQ ID NO:5188 through SEQ ID NO:5189 as a probe configured to target a reference SARS-CoV-2 allele, and one of SEQ ID NO:7188 through SEQ ID NO:7189 as a probe configured to target a mutant SARS-CoV-2 allele;
an assay including one of SEQ ID NO:1192 through SEQ ID NO:1193 as a forward primer, one of SEQ ID NO:3192 through SEQ ID NO:3193 as a reverse primer, one of SEQ ID NO:5192 through SEQ ID NO:5193 as a probe configured to target a reference SARS-CoV-2 allele, and one of SEQ ID NO:7192 through SEQ ID NO:7193 as a probe configured to target a mutant SARS-CoV-2 allele.

18. The composition of claim 8, formulated to target and/or distinguish between the Alpha and Omicron variants of SARS-CoV-2.

19. The composition of claim 18, comprising at least one assay formulated for targeting the Alpha variant selected from:
an assay including one of SEQ ID NO:560 through SEQ ID NO:562 as a forward primer, one of SEQ ID NO:2560 through SEQ ID NO:2562 as a reverse primer, one of SEQ ID NO:4560 through SEQ ID NO:4562 as a probe configured to target a reference SARS-CoV-2 allele, and one of SEQ ID NO:6560 through SEQ ID NO:6562 as a probe configured to target a mutant SARS-CoV-2 allele;
an assay including SEQ ID NO:564 as a forward primer, SEQ ID NO:2564 as a reverse primer, SEQ ID NO:4564 as a probe configured to target a reference SARS-CoV-2 allele, and SEQ ID NO:6564 as a probe configured to target a mutant SARS-CoV-2 allele;
an assay including one of SEQ ID NO:803 through SEQ ID NO:809 as a forward primer, one of SEQ ID NO:2803 through SEQ ID NO:2809 as a reverse primer, one of SEQ ID NO:4803 through SEQ ID NO:4809 as a probe configured to target a reference SARS-CoV-2 allele, and one of SEQ ID NO:6803 through SEQ ID NO:6809 as a probe configured to target a mutant SARS-CoV-2 allele;
an assay including one of SEQ ID NO:820 through SEQ ID NO:967 as a forward primer, one of SEQ ID NO:2820 through SEQ ID NO:2967 as a reverse primer, one of SEQ ID NO:4820 through SEQ ID NO:4967 as a probe configured to target a reference SARS-CoV-2 allele, and one of SEQ ID NO:6820 through SEQ ID NO:6967 as a probe configured to target a mutant SARS-CoV-2 allele;
an assay including SEQ ID NO:28 as a forward primer, SEQ ID NO:2028 as a reverse primer, SEQ ID NO:4028 as a probe configured to target a reference SARS-CoV-2 allele, and SEQ ID NO:6028 as a probe configured to target a mutant SARS-CoV-2 allele;
an assay including one of SEQ ID NO:336 through SEQ ID NO:380 as a forward primer, one of SEQ ID NO:2336 through SEQ ID NO:2380 as a reverse primer, one of SEQ ID NO:4336 through SEQ ID NO:4380 as a probe configured to target a reference SARS-CoV-2 allele, and one of SEQ ID NO:6336 through SEQ ID NO:6380 as a probe configured to target a mutant SARS-CoV-2 allele;
an assay including one of SEQ ID NO:93 through SEQ ID NO:323 as a forward primer, one of SEQ ID NO:2093 through SEQ ID NO:2323 as a reverse primer, one of SEQ ID NO:4093 through SEQ ID NO:4323 as a probe configured to target a reference SARS-CoV-2 allele, and one of SEQ ID NO:6093 through SEQ ID NO:6323 as a probe configured to target a mutant SARS-CoV-2 allele;
an assay including one of SEQ ID NO:1063 through SEQ ID NO:1186 as a forward primer, one of SEQ ID NO:3063 through SEQ ID NO:3186 as a reverse primer, one of SEQ ID NO:5063 through SEQ ID NO:5186 as a probe configured to target a reference SARS-CoV-2 allele, and one of SEQ ID NO:7063 through SEQ ID NO:7186 as a probe configured to target a mutant SARS-CoV-2 allele;
an assay including one of SEQ ID NO:1197 through SEQ ID NO:1267 as a forward primer, one of SEQ ID NO:3197 through SEQ ID NO:3267 as a reverse primer, one of SEQ ID NO:5197 through SEQ ID NO:5267 as a probe configured to target a reference SARS-CoV-2 allele, and one of SEQ ID NO:7197 through SEQ ID NO:7267 as a probe configured to target a mutant SARS-CoV-2 allele; and
at least one assay formulated for targeting the Omicron variant selected from:
an assay including one of SEQ ID NO:61 through SEQ ID NO:62 as a forward primer, one of SEQ ID NO:2061 through SEQ ID NO:2062 as a reverse primer, one of SEQ ID NO:4061 through SEQ ID NO:4062 as a probe configured to target a reference SARS-CoV-2 allele, and one of SEQ ID NO:6061 through SEQ ID NO:6062 as a probe configured to target a mutant SARS-CoV-2 allele;
an assay including SEQ ID NO:616 as a forward primer, SEQ ID NO:2616 as a reverse primer, SEQ ID NO:4616 as a probe configured to target a reference SARS-CoV-2 allele, and SEQ ID NO:6616 as a probe configured to target a mutant SARS-CoV-2 allele;
an assay including one of SEQ ID NO:972 through SEQ ID NO:975 as a forward primer, one of SEQ ID NO:2972 through SEQ ID NO:2975 as a reverse primer, one of SEQ ID NO:4972 through SEQ ID NO:4975 as a probe configured to target a reference SARS-CoV-2 allele, and one of SEQ ID NO:6972 through SEQ ID NO:6975 as a probe configured to target a mutant SARS-CoV-2 allele;
an assay including one of SEQ ID NO:71 through SEQ ID NO:72 as a forward primer, one of SEQ ID NO:2071 through SEQ ID NO:2072 as a reverse primer, one of SEQ ID NO:4071 through SEQ ID NO:4072 as a probe configured to target a reference SARS-CoV-2 allele, and one of SEQ ID NO:6071 through SEQ ID NO:6072 as a probe configured to target a mutant SARS-CoV-2 allele;
an assay including SEQ ID NO:1196 as a forward primer, SEQ ID NO:3196 as a reverse primer, SEQ ID NO:5196 as a probe configured to target a reference SARS-CoV-2 allele, and SEQ ID NO:7196 as a probe configured to target a mutant SARS-CoV-2 allele.

20. The composition of claim 8, formulated to target and/or distinguish between the Delta and Omicron variants of SARS-CoV-2.

21. The composition of claim 20, comprising at least one assay formulated for targeting the Delta variant selected from:
an assay including SEQ ID NO:784 as a forward primer, SEQ ID NO:2784 as a reverse primer, SEQ ID NO:4784 as a probe configured to target a reference SARS-CoV-2 allele, and SEQ ID NO:6784 as a probe configured to target a mutant SARS-CoV-2 allele;
an assay including SEQ ID NO:968 as a forward primer, SEQ ID NO:2968 as a reverse primer, SEQ ID NO:4968 as a probe configured to target a reference SARS-CoV-2 allele, and SEQ ID NO:6968 as a probe configured to target a mutant SARS-CoV-2 allele;
an assay including one of SEQ ID NO:607 through SEQ ID NO:608 as a forward primer, one of SEQ ID NO:2607 through SEQ ID NO:2608 as a reverse primer, one of SEQ ID NO:4607 through SEQ ID NO:4608 as a probe configured to target a reference SARS-CoV-2 allele, and one of SEQ ID NO:6607 through SEQ ID NO:6608 as a probe configured to target a mutant SARS-CoV-2 allele;
an assay including one of SEQ ID NO:1188 through SEQ ID NO:1189 as a forward primer, one of SEQ ID NO:3188 through SEQ ID NO:3189 as a reverse primer, one of SEQ ID NO:5188 through SEQ ID NO:5189 as a probe configured to target a reference SARS-CoV-2 allele, and one of SEQ ID NO:7188 through SEQ ID NO:7189 as a probe configured to target a mutant SARS-CoV-2 allele;
an assay including one of SEQ ID NO:1192 through SEQ ID NO:1193 as a forward primer, one of SEQ ID NO:3192 through SEQ ID NO:3193 as a reverse primer, one of SEQ ID NO:5192 through SEQ ID NO:5193 as a probe configured to target a reference SARS-CoV-2 allele, and one of SEQ ID NO:7192 through SEQ ID NO:7193 as a probe configured to target a mutant SARS-CoV-2 allele; and
at least one assay formulated for targeting the Omicron variant selected from:
an assay including one of SEQ ID NO:61 through SEQ ID NO:62 as a forward primer, one of SEQ ID NO:2061 through SEQ ID NO:2062 as a reverse primer, one of SEQ ID NO:4061 through SEQ ID NO:4062 as a probe configured to target a reference SARS-CoV-2 allele, and one of SEQ ID NO:6061 through SEQ ID NO:6062 as a probe configured to target a mutant SARS-CoV-2 allele;
an assay including SEQ ID NO:616 as a forward primer, SEQ ID NO:2616 as a reverse primer, SEQ ID NO:4616 as a probe configured to target a reference SARS-CoV-2 allele, and SEQ ID NO:6616 as a probe configured to target a mutant SARS-CoV-2 allele;
an assay including one of SEQ ID NO:972 through SEQ ID NO:975 as a forward primer, one of SEQ ID NO:2972 through SEQ ID NO:2975 as a reverse primer, one of SEQ ID NO:4972 through SEQ ID NO:4975 as a probe configured to target a reference SARS-CoV-2 allele, and one of SEQ ID NO:6972 through SEQ ID NO:6975 as a probe configured to target a mutant SARS-CoV-2 allele;
an assay including one of SEQ ID NO:71 through SEQ ID NO:72 as a forward primer, one of SEQ ID NO:2071 through SEQ ID NO:2072 as a reverse primer, one of SEQ ID NO:4071 through SEQ ID NO:4072 as a probe configured to target a reference SARS-CoV-2 allele, and one of SEQ ID NO:6071 through SEQ ID NO:6072 as a probe configured to target a mutant SARS-CoV-2 allele;
an assay including SEQ ID NO:1196 as a forward primer, SEQ ID NO:3196 as a reverse primer, SEQ ID NO:5196 as a probe configured to target a reference SARS-CoV-2 allele, and SEQ ID NO:7196 as a probe configured to target a mutant SARS-CoV-2 allele.

22. The composition of claim 8, formulated to target and/or distinguish between the Alpha, Delta, and Omicron variants of SARS-CoV-2.

23. The composition of claim 22, comprising at least one assay formulated for targeting the Alpha variant selected from:
an assay including one of SEQ ID NO:560 through SEQ ID NO:562 as a forward primer, one of SEQ ID NO:2560 through SEQ ID NO:2562 as a reverse primer, one of SEQ ID NO:4560 through SEQ ID NO:4562 as a probe configured to target a reference SARS-CoV-2 allele, and one of SEQ ID NO:6560 through SEQ ID NO:6562 as a probe configured to target a mutant SARS-CoV-2 allele;
an assay including SEQ ID NO:564 as a forward primer, SEQ ID NO:2564 as a reverse primer, SEQ ID NO:4564 as a probe configured to target a reference SARS-CoV-2 allele, and SEQ ID NO:6564 as a probe configured to target a mutant SARS-CoV-2 allele;
an assay including one of SEQ ID NO:803 through SEQ ID NO:809 as a forward primer, one of SEQ ID NO:2803 through SEQ ID NO:2809 as a reverse primer, one of SEQ ID NO:4803 through SEQ ID NO:4809 as a probe configured to target a reference SARS-CoV-2 allele, and one of SEQ ID NO:6803 through SEQ ID NO:6809 as a probe configured to target a mutant SARS-CoV-2 allele;
an assay including one of SEQ ID NO:820 through SEQ ID NO:967 as a forward primer, one of SEQ ID NO:2820 through SEQ ID NO:2967 as a reverse primer, one of SEQ ID NO:4820 through SEQ ID NO:4967 as a probe configured to target a reference SARS-CoV-2 allele, and one of SEQ ID NO:6820 through SEQ ID NO:6967 as a probe configured to target a mutant SARS-CoV-2 allele;
an assay including SEQ ID NO:28 as a forward primer, SEQ ID NO:2028 as a reverse primer, SEQ ID NO:4028 as a probe configured to target a reference SARS-CoV-2 allele, and SEQ ID NO:6028 as a probe configured to target a mutant SARS-CoV-2 allele;
an assay including one of SEQ ID NO:336 through SEQ ID NO:380 as a forward primer, one of SEQ ID NO:2336 through SEQ ID NO:2380 as a reverse primer, one of SEQ ID NO:4336 through SEQ ID NO:4380 as a probe configured to target a reference SARS-CoV-2 allele, and one of SEQ ID NO:6336 through SEQ ID NO:6380 as a probe configured to target a mutant SARS-CoV-2 allele;
an assay including one of SEQ ID NO:93 through SEQ ID NO:323 as a forward primer, one of SEQ ID NO:2093 through SEQ ID NO:2323 as a reverse primer, one of SEQ ID NO:4093 through SEQ ID NO:4323 as a probe configured to target a reference SARS-CoV-2 allele, and one of SEQ ID NO:6093 through SEQ ID NO:6323 as a probe configured to target a mutant SARS-CoV-2 allele;
an assay including one of SEQ ID NO:1063 through SEQ ID NO:1186 as a forward primer, one of SEQ ID NO:3063 through SEQ ID NO:3186 as a reverse primer, one of SEQ ID NO:5063 through SEQ ID NO:5186 as a probe configured to target a reference SARS-CoV-2 allele, and one of SEQ ID NO:7063 through SEQ ID NO:7186 as a probe configured to target a mutant SARS-CoV-2 allele;
an assay including one of SEQ ID NO:1197 through SEQ ID NO:1267 as a forward primer, one of SEQ ID NO:3197 through SEQ ID NO:3267 as a reverse primer, one of SEQ ID NO:5197 through SEQ ID NO:5267 as a probe configured to target a reference SARS-CoV-2 allele, and one of SEQ ID NO:7197 through SEQ ID NO:7267 as a probe configured to target a mutant SARS-CoV-2 allele;
at least one assay formulated for targeting the Delta variant selected from:
an assay including SEQ ID NO:784 as a forward primer, SEQ ID NO:2784 as a reverse primer, SEQ ID NO:4784 as a probe configured to target a reference SARS-CoV-2 allele, and SEQ ID NO:6784 as a probe configured to target a mutant SARS-CoV-2 allele;
an assay including SEQ ID NO:968 as a forward primer, SEQ ID NO:2968 as a reverse primer, SEQ ID NO:4968 as a probe configured to target a reference SARS-CoV-2 allele, and SEQ ID NO:6968 as a probe configured to target a mutant SARS-CoV-2 allele;
an assay including one of SEQ ID NO:607 through SEQ ID NO:608 as a forward primer, one of SEQ ID NO:2607 through SEQ ID NO:2608 as a reverse primer, one of SEQ ID NO:4607 through SEQ ID NO:4608 as a probe configured to target a reference SARS-CoV-2 allele, and one of SEQ ID NO:6607 through SEQ ID NO:6608 as a probe configured to target a mutant SARS-CoV-2 allele;
an assay including one of SEQ ID NO:1188 through SEQ ID NO:1189 as a forward primer, one of SEQ ID NO:3188 through SEQ ID NO:3189 as a reverse primer, one of SEQ ID NO:5188 through SEQ ID NO:5189 as a probe configured to target a reference SARS-CoV-2 allele, and one of SEQ ID NO:7188 through SEQ ID NO:7189 as a probe configured to target a mutant SARS-CoV-2 allele;
an assay including one of SEQ ID NO:1192 through SEQ ID NO:1193 as a forward primer, one of SEQ ID NO:3192 through SEQ ID NO:3193 as a reverse primer, one of SEQ ID NO:5192 through SEQ ID NO:5193 as a probe configured to target a reference SARS-CoV-2 allele, and one of SEQ ID NO:7192 through SEQ ID NO:7193 as a probe configured to target a mutant SARS-CoV-2 allele; and
at least one assay formulated for targeting the Omicron variant selected from:
an assay including one of SEQ ID NO:61 through SEQ ID NO:62 as a forward primer, one of SEQ ID NO:2061 through SEQ ID NO:2062 as a reverse primer, one of SEQ ID NO:4061 through SEQ ID NO:4062 as a probe configured to target a reference SARS-CoV-2 allele, and one of SEQ ID NO:6061 through SEQ ID NO:6062 as a probe configured to target a mutant SARS-CoV-2 allele;
an assay including SEQ ID NO:616 as a forward primer, SEQ ID NO:2616 as a reverse primer, SEQ ID NO:4616 as a probe configured to target a reference SARS-CoV-2 allele, and SEQ ID NO:6616 as a probe configured to target a mutant SARS-CoV-2 allele;
an assay including one of SEQ ID NO:972 through SEQ ID NO:975 as a forward primer, one of SEQ ID NO:2972 through SEQ ID NO:2975 as a reverse primer, one of SEQ ID NO:4972 through SEQ ID NO:4975 as a probe configured to target a reference SARS-CoV-2 allele, and one of SEQ ID NO:6972 through SEQ ID NO:6975 as a probe configured to target a mutant SARS-CoV-2 allele;
an assay including one of SEQ ID NO:71 through SEQ ID NO:72 as a forward primer, one of SEQ ID NO:2071 through SEQ ID NO:2072 as a reverse primer, one of SEQ ID NO:4071 through SEQ ID NO:4072 as a probe configured to target a reference SARS-CoV-2 allele, and one of SEQ ID NO:6071 through SEQ ID NO:6072 as a probe configured to target a mutant SARS-CoV-2 allele;
an assay including SEQ ID NO:1196 as a forward primer, SEQ ID NO:3196 as a reverse primer, SEQ ID NO:5196 as a probe configured to target a reference SARS-CoV-2 allele, and SEQ ID NO:7196 as a probe configured to target a mutant SARS-CoV-2 allele.

24. (canceled)

25. (canceled)

26. (canceled)

27. (canceled)

28. (canceled)

29. (canceled)

30. (canceled)

31. (canceled)

32. (canceled)

33. (canceled)

34. (canceled)

35. (canceled)

36. (canceled)

37. (canceled)

38. (canceled)

39. (canceled)

40. (canceled)

41. (canceled)

42. (canceled)

43. (canceled)

44. (canceled)

45. (canceled)

46. (canceled)

47. (canceled)

48. (canceled)

49. (canceled)

50. (canceled)

51. (canceled)

52. (canceled)

53. (canceled)

54. (canceled)

55. (canceled)

56. (canceled)

57. (canceled)

58. (canceled)

59. (canceled)

60. (canceled)

61. (canceled)

62. (canceled)

63. (canceled)

64. (canceled)

65. (canceled)

66. (canceled)

67. (canceled)

68. (canceled)

69. (canceled)

70. (canceled)

71. (canceled)
